(19) United States
(12) Patent Application Publication
(10) Pub. No.: US 2013/0014292 A1
(43) Pub. Date: Jan. 10, 2013

(54) TRANSGENIC PLANTS HAVING INCREASED BIOMASS

(76) Inventors: Roger I. Pennell, Malibu, CA (US); Sam Harris, Newbury Park, CA (US); Vijay Sharma, Wildwood, MO (US); Michael F. Portereiko, Thousand Oaks, CA (US); Han-Suk Kim, Camarillo, CA (US); Gerard Magpantay, Calabasas, CA (US); Shing Kwok, Fairfax, VA (US)

(21) Appl. No.: 13/119,572

(22) PCT Filed: Sep. 16, 2009
(86) PCT No.: PCT/US09/57116

§ 371 Date: Aug. 10, 2011

Related U.S. Application Data
(60) Provisional application No. 61/097,789, filed on Sep. 17, 2008.

(51) Int. Cl. A01H 5/00; C12N 15/29; A01H 5/10; C12N 15/82; C12N 5/10

(52) U.S. Cl. 800/290; 800/298; 435/419; 800/320; 800/320.1; 800/312; 800/320.2; 800/314; 800/322; 800/320.3; 536/23.6

(57) ABSTRACT

Methods and materials for modulating biomass levels in plants are disclosed. For example, nucleic acids encoding biomass-modulating polypeptides are disclosed as well as methods for using such nucleic acids to transform plant cells. Also disclosed are plants having increased biomass levels and plant products produced from plants having increased biomass levels.

### CROSS-REFERENCE TO RELATED APPLICATIONS

[0001] This application claims the benefit of U.S. Provisional Application Ser. No. 61/097,789, filed on Sep. 17, 2008. The disclosure of the prior application is incorporated by reference in its entirety.

### INCORPORATION-BY-REFERENCE OF SEQUENCE LISTING OR TABLE

[0002] The material in the accompanying sequence listing is hereby incorporated by reference into this application. The accompanying file, named sequence_listing.txt was created on Sep. 11, 2008 and is 1,874 KB. The file can be accessed using Microsoft Word on a computer that uses Windows OS.

### TECHNICAL FIELD

[0003] This document relates to methods and materials involved in modulating biomass levels in plants. For example, this document provides plants having increased biomass levels as well as materials and methods for making plants and plant products having increased biomass levels.

### BACKGROUND

[0004] The present invention relates to methods of increasing biomass in plants and plants generated thereby. Plants having increased and/or improved biomass are useful for agriculture, horticulture, biomass to energy conversion, paper production, plant product production, and other industries. In particular, there is a need for increases in biomass for dedicated energy crops such as Panicum virgatum L. (switchgrass), Miscanthus x gigantus (miscanthus), Sorghum sp., and Saccharum sp. (sugar cane). Throughout human history, access to plant biomass for both food and fuel has been essential to maintaining and increasing population levels. Scientists are continually striving to improve biomass in agricultural crops. The large amount of research related to increasing plant biomass, particularly for dedicated energy crops, indicates the level of importance placed on providing sustainable sources of energy for the population. The urgency of developing sustainable and stable sources of plant biomass for energy is underscored by current events, such as rising oil prices. The amount of biomass produced by plants is a quantitative trait affected by a number of biochemical pathways. There is a need for molecular genetic approaches to more rapidly produce plants having increased biomass. There is also a need to produce plant species that grow more efficiently and produce more biomass in various geographic and/or climatic environments. It would be desirable for such approaches to be applicable to multiple plant species (Zhang et al. (2004) Plant Physiol. 135:615). Despite some progress in molecular genetic approaches, there is also a need to identify specific genes and/or sequences that can be used to effectively increase biomass in plants.

### SUMMARY

[0005] This document provides methods and materials related to plants having modulated levels of biomass. For example, this document provides transgenic plants and plant cells having increased levels of biomass, nucleic acids used to generate transgenic plants and plant cells having increased levels of biomass, methods for making plants having increased levels of biomass, and methods for making plant cells that can be used to generate plants having increased levels of biomass. Such plants and plant cells can be grown to produce, for example, plants having increased height, increased tiller number, or increased dry weight. Plants having increased biomass levels may be useful to produce biomass for food and feed, which may benefit both humans and animals. Plants having increased biomass levels may be useful in converting such biomass to a liquid fuel (e.g., ethanol), or other chemicals, or may be useful as a thermochemical fuel.

[0006] Methods of producing a plants having increased biomass are provided herein. In one aspect, a method comprises growing a plant cell comprising an exogenous nucleic acid. The exogenous nucleic acid comprises a regulatory region operably linked to a nucleotide sequence encoding a polypeptide. The Hidden Markov Model (HMM) bit score of the amino acid sequence of the polypeptide is greater than about 210, 230, 350, 215, 880, 240, 310, or 810 using an HMM generated from the amino acid sequences depicted in one of FIGS. 1 to 7, respectively. The plant has a difference in the level of biomass as compared to the corresponding level of biomass of a control plant that does not comprise the exogenous nucleic acid.

[0007] In another aspect, a method comprises growing a plant cell comprising an exogenous nucleic acid. The exogenous nucleic acid comprises a regulatory region operably linked to a nucleotide sequence encoding a polypeptide having 80 percent or greater sequence identity to an amino acid sequence set forth in SEQ ID NOs: 2, 4, 6, 8, 9, 11, 13, 14, 15, 16, 17, 19, 21, 22, 23, 25, 26, 28, 30, 32, 34, 36, 38, 39, 40, 41, 42, 43, 44, 45, 46, 48, 49, 50, 51, 52, 53, 54, 55, 56, 58, 60, 61, 62, 63, 64, 66, 68, 69, 70, 71, 72, 73, 74, 75, 76, 77, 78, 79, 80, 81, 82, 83, 84, 85, 86, 87, 88, 89, 90, 91, 92, 93, 94, 95, 96, 97, 98, 99, 100, 101, 102, 103, 104, 106, 107, 109, 111, 112, 114, 115, 117, 119, 120, 122, 124, 126, 127, 129, 131, 133, 135, 137, 139, 140, 141, 142, 143, 144, 145, 146, 147, 148, 149, 150, 151, 152, 153, 154, 155, 156, 157, 158, 159, 160, 161, 162, 163, 165, 166, 167, 169, 171, 173, 175, 176, 177, 179, 181, 183, 184, 185, 186, 188, 190, 192, 193, 195, 197, 198, 200, 202, 204, 206, 208, 210, 212, 214, 215, 217, 218, 219, 220, 222, 224, 226, 228, 230, 232, 234, 236, 238, 240, 241, 242, 243, 245, 247, 249, 251, 253, 254, 255, 256, 257, 258, 259, 260, 261, 262, 263, 264, 265, 266, 267, 268, 269, 270, 271, 272, 273, 274, 275, 276, 277, 278, 279, 280, 281, 282, 283, 284, 285, 286, 287, 288, 289, 290, 291, 292, 293, 294, 295, 296, 297, 298, 299, 300, 301, 302, 303, 304, 305, 306, 307, 308, 309, 310, 311, 312, 313, 315, 317, 319, 321, 323, 325, 327, 329, 330, 331, 332, 334, 335, 336, 338, 340, 341, 343, 345, 346, 347, 349, 349, 350, 351, 352, 353, 354, 355, 356, 357, 359, 360, 361, 362, 363, 364, 366, 367, 369, 371, 373, 374, 374, 375, 376, 376, 377, 378, 380, 382, 384, 385, 386, 387, 388, 389, 390, 391, 391, 393, 395, 397, 398, 399, 400, 400, 401, 401, 403, 403, 405, 405, 407, 407, 408, 410, 410, 411, 411, 413, 414, 415, 416, 417, 418, 419, 420, 420, 421, 422, 423, 424, 426, 426, 428, 428, 429, 430, 430, 431, 432, 432, 433, 433, 434, 435, 436, 437, 438, 439, 440, 441, 442, 443, 444, 445, 446, 447, 448, 449, 450, 451, 452, 453, 453, 454, 455, 456, 457, 458, 459, 460, 461, 462, 463, 464, 465, 466, 467, 468, 469, 470, 471, 472, 474, 475, 477, 479, 481, 483, 485, 487, 488, 489, 490, 492, 494, 496, 498, 500, 502, 503, 504, 506, 508, 510, 511, 513, 515, 517, 518, 519, 521, 523, 525, 527, 529, 531, 533, 534, 536, 538, 540, 541, 543, 544, 546, 547, 548, 549, 550, 551, 552, 553, 554, 555, 557, 559, 560, 562, 564, 566, 568, 569, 570, 571, 572, 573, 574, 575, 576, 577, 578, 580, 582, 584, 586, 587, 588, 589, 591, 593, 595, 596, 598, 600, 602, 603, 605, 606, 608, 608, 609, 610, 611, 612, 613, 615, 617, 619, 621, 623, 624, 626, 627, 628, 630, 631, 633, 634, 636, or 638. A plant produced from the plant cell can be used to generate a plant that has a difference in the level of biomass as compared to the corresponding level of biomass of a control plant that does not comprise the exogenous nucleic acid.

[0008] In another aspect, a method comprises growing a plant cell comprising an exogenous nucleic acid. The exogenous nucleic acid comprises a regulatory region operably linked to a nucleotide sequence having 80 percent or greater sequence identity to a nucleotide sequence, or a fragment thereof, set forth in SEQ ID NO: 1, 3, 5, 7, 10, 12, 18, 20, 24, 27, 29, 31, 33, 35, 37, 47, 57, 59, 65, 67, 105, 108, 110, 113, 116, 118, 121, 123, 125, 128, 130, 132, 134, 136, 138, 164, 168, 170, 172, 174, 178, 180, 182, 187, 189, 191, 194, 196, 199, 201, 203, 205, 207, 209, 211, 213, 216, 221, 223, 225, 227, 229, 231, 233, 235, 237, 239, 244, 246, 248, 250, 252, 314, 316, 318, 320, 322, 324, 326, 328, 333, 337, 339, 342, 344, 348, 358, 365, 368, 370, 372, 379, 381, 383, 392, 394, 396, 402, 404, 406, 409, 412, 425, 427, 473, 476, 478, 480, 482, 484, 486, 491, 493, 495, 497, 499, 501, 505, 507, 509, 512, 514, 516, 520, 522, 524, 526, 528, 530, 532, 535, 537, 539, 542, 556, 558, 561, 563, 565, 567, 579, 581, 583, 585, 590, 592, 594, 597, 599, 601, 604, 607, 614, 616, 618, 620, 622, 625, 629, 632, 635, or 637. A plant produced from the plant cell has a difference in the level of biomass as compared to the corresponding level of biomass of a control plant that does not comprise the exogenous nucleic acid.

[0009] Methods of modulating the level of biomass in a plant are provided herein. In one aspect, a method comprises introducing into a plant cell an exogenous nucleic acid that comprises a regulatory region operably linked to a nucleotide sequence encoding a polypeptide. The HMM bit score of the amino acid sequence of the polypeptide is greater than about 210, using an HMM generated from the amino acid sequences depicted in one of FIGS. 1 to 7. A plant produced from the plant cell has a difference in the level of biomass as compared to the corresponding level of biomass of a control plant that does not comprise the exogenous nucleic acid.

[0010] In certain embodiments, the HMM score of the amino acid sequence of the polypeptide is greater than about 230, using an HMM generated from the amino acid sequences depicted in FIG. 1, wherein the polypeptide comprises a polyprenyl synthetase domain having at least 60 percent or greater (e.g., 65, 70, 75, 80, 85, 90, 95, 99, or 100%) sequence identity to residues 93 to 356 of SEQ ID NO: 2.

[0011] In certain embodiments, the HMM score of the amino acid sequence of the polypeptide is greater than about 350, using an HMM generated from the amino acid sequences depicted in FIG. 2.

[0012] In certain embodiments, the HMM score of the amino acid sequence of the polypeptide is greater than about 215, using an HMM generated from the amino acid sequences depicted in FIG. 3, wherein the polypeptide comprises a multiprotein bridging factor 1 domain having at least 60 percent or greater (e.g., 65, 70, 75, 80, 85, 90, 95, 99, or 100%) sequence identity to residues 11 to 83 of SEQ ID NO: 165.

[0013] In certain embodiments, the HMM score of the amino acid sequence of the polypeptide is greater than about 215, using an HMM generated from the amino acid sequences depicted in FIG. 3, wherein the polypeptide comprises a Helix-turn-helix domain having at least 60 percent or greater (e.g., 65, 70, 75, 80, 85, 90, 95, 99, or 100%) sequence identity to residues 91 to 145 of SEQ ID NO: 165.

[0014] In certain embodiments, the HMM score of the amino acid sequence of the polypeptide is greater than about 880, using an HMM generated from the amino acid sequences depicted in FIG. 4, wherein the polypeptide comprises a plant neutral invertase domain having at least 60 percent or greater (e.g., 65, 70, 75, 80, 85, 90, 95, 99, or 100%) sequence identity to residues 84 to 551 of SEQ ID NO: 315.

[0015] In certain embodiments, the HMM score of the amino acid sequence of the polypeptide is greater than about 240, using an HMM generated from the amino acid sequences depicted in FIG. 5, wherein the polypeptide comprises a sedlin, N-terminal conserved region having at least 60 percent or greater (e.g., 65, 70, 75, 80, 85, 90, 95, 99, or 100%) sequence identity to residues 9 to 126 of SEQ ID NO: 474.

[0016] In certain embodiments, the HMM score of the amino acid sequence of the polypeptide is greater than about 310, using an HMM generated from the amino acid sequences depicted in FIG. 6, wherein the polypeptide comprises a G-box binding protein MFMR domain having at least 60 percent or greater (e.g., 65, 70, 75, 80, 85, 90, 95, 99, or 100%) sequence identity to residues 1 to 188 of SEQ ID NO: 521.

[0017] In certain embodiments, the HMM score of the amino acid sequence of the polypeptide is greater than about 310, using an HMM generated from the amino acid sequences depicted in FIG. 6, wherein the polypeptide comprises a bZIP_{—}1 transcription factor domain having at least 60 percent or greater (e.g., 65, 70, 75, 80, 85, 90, 95, 99, or 100%) sequence identity to residues 279 to 342 of SEQ ID NO: 521.

[0018] In certain embodiments, the HMM score of the amino acid sequence of the polypeptide is greater than about 310, using an HMM generated from the amino acid sequences depicted in FIG. 6, wherein the polypeptide comprises a bZIP_{—}2 basic region leucine zipper domain having at least 60 percent or greater (e.g., 65, 70, 75, 80, 85, 90, 95, 99, or 100%) sequence identity to residues 279 to 333 of SEQ ID NO: 521.

[0019] In certain embodiments, the HMM score of the amino acid sequence of the polypeptide is greater than about 810, using an HMM generated from the amino acid sequences depicted in FIG. 7, wherein the polypeptide comprises an epimerase domain having at least 60 percent or greater (e.g., 65, 70, 75, 80, 85, 90, 95, 99, or 100%) sequence identity to residues 20 to 290 of SEQ ID NO: 591.

[0020] In another aspect, a method comprises introducing into a plant cell an exogenous nucleic acid that comprises a regulatory region operably linked to a nucleotide sequence encoding a polypeptide having 80 percent or greater sequence identity to an amino acid sequence set forth in SEQ ID NO: 2, 4, 6, 8, 9, 11, 13, 14, 15, 16, 17, 19, 21, 22, 23, 25, 26, 28, 30, 32, 34, 36, 38, 39, 40, 41, 42, 43, 44, 45, 46, 48, 49, 50, 51, 52, 53, 54, 55, 56, 58, 60, 61, 62, 63, 64, 66, 68, 69, 70, 71, 72, 73, 74, 75, 76, 77, 78, 79, 80, 81, 82, 83, 84, 85, 86, 87, 88, 89, 90, 91, 92, 93, 94, 95, 96, 97, 98, 99, 100, 101, 102, 103, 104, 106, 107, 109, 111, 112, 114, 115, 117, 119, 120, 122, 124, 126, 127, 129, 131, 133, 135, 137, 139, 140, 141, 142, 143, 144, 145, 146, 147, 148, 149, 150, 151, 152, 153, 154, 155, 156, 157, 158, 159, 160, 161, 162, 163, 165, 166, 167, 169, 171, 173, 175, 176, 177, 179, 181, 183, 184, 185, 186, 188, 190, 192, 193, 195, 197, 198, 200, 202, 204, 206, 208, 210, 212, 214, 215, 217, 218, 219, 220, 222, 224, 226, 228, 230, 232, 234, 236, 238, 240, 241, 242, 243, 245, 247, 249, 251, 253, 254, 255, 256, 257, 258, 259, 260, 261, 262, 263, 264, 265, 266, 267, 268, 269, 270, 271, 272, 273, 274, 275, 276, 277, 278, 279, 280, 281, 282, 283, 284, 285, 286, 287, 288, 289, 290, 291, 292, 293, 294, 295, 296, 297, 298, 299, 300, 301, 302, 303, 304, 305, 306, 307, 308, 309, 310, 311, 312, 313, 315, 317, 319, 321, 323, 325, 327, 329, 330, 331, 332, 334, 335, 336, 338, 340, 341, 343, 345, 346, 347, 349, 349, 350, 351, 352, 353, 354, 355, 356, 357, 359, 360, 361, 362, 363, 364, 366, 367, 369, 371, 373, 374, 374, 375, 376, 376, 377, 378, 380, 382, 384, 385, 386, 387, 388, 389, 390, 391, 391, 393, 395, 397, 398, 399, 400, 400, 401, 401, 403, 403, 405, 405, 407, 407, 408, 410, 410, 411, 411, 413, 414, 415, 416, 417, 418, 419, 420, 420, 421, 422, 423, 424, 426, 426, 428, 428, 429, 430, 430, 431, 432, 432, 433, 433, 434, 435, 436, 437, 438, 439, 440, 441, 442, 443, 444, 445, 446, 447, 448, 449, 450, 451, 452, 453, 453, 454, 455, 456, 457, 458, 459, 460, 461, 462, 463, 464, 465, 466, 467, 468, 469, 470, 471, 472, 474, 475, 477, 479, 481, 483, 485, 487, 488, 489, 490, 492, 494, 496, 498, 500, 502, 503, 504, 506, 508, 510, 511, 513, 515, 517, 518, 519, 521, 523, 525, 527, 529, 531, 533, 534, 536, 538, 540, 541, 543, 544, 546, 547, 548, 549, 550, 551, 552, 553, 554, 555, 557, 559, 560, 562, 564, 566, 568, 569, 570, 571, 572, 573, 574, 575, 576, 577, 578, 580, 582, 584, 586, 587, 588, 589, 591, 593, 595, 596, 598, 600, 602, 603, 605, 606, 608, 608, 609, 610, 611, 612, 613, 615, 617, 619, 621, 623, 624, 626, 627, 628, 630, 631, 633, 634, 636, or 638. A plant produced from the plant cell has a difference in the level of biomass as compared to the corresponding level of biomass of a control plant that does not comprise the exogenous nucleic acid. The polypeptide in any of the above methods can have the amino acid sequence set forth in SEQ ID NO: 2, 106, 165, 315, 474, 521, or 591.

[0021] In another aspect, a method comprises introducing into a plant cell an exogenous nucleic acid, that comprises a regulatory region operably linked to a nucleotide sequence having 80 percent or greater sequence identity to a nucleotide sequence set forth in SEQ ID NO: 3, 5, 7, 10, 12, 18, 20, 24, 27, 29, 31, 33, 35, 37, 47, 57, 59, 65, 67, 105, 108, 110, 113, 116, 118, 121, 123, 125, 128, 130, 132, 134, 136, 138, 164, 168, 170, 172, 174, 178, 180, 182, 187, 189, 191, 194, 196, 199, 201, 203, 205, 207, 209, 211, 213, 216, 221, 223, 225, 227, 229, 231, 233, 235, 237, 239, 244, 246, 248, 250, 252, 314, 316, 318, 320, 322, 324, 326, 328, 333, 337, 339, 342, 344, 348, 358, 365, 368, 370, 372, 379, 381, 383, 392, 394, 396, 402, 404, 406, 409, 412, 425, 427, 473, 476, 478, 480, 482, 484, 486, 491, 493, 495, 497, 499, 501, 505, 507, 509, 512, 514, 516, 520, 522, 524, 526, 528, 530, 532, 535, 537, 539, 542, 556, 558, 561, 563, 565, 567, 579, 581, 583, 585, 590, 592, 594, 597, 599, 601, 604, 607, 614, 616, 618, 620, 622, 625, 629, 632, 635, or 637, or a fragment thereof. A plant produced from the plant cell has a difference in the level of biomass as compared to the corresponding level of biomass of a control plant that does not comprise the exogenous nucleic acid.

[0022] Plant cells comprising an exogenous nucleic acid are provided herein. In one aspect, the exogenous nucleic acid comprises a regulatory region operably linked to a nucleotide sequence encoding a polypeptide. The HMM bit score of the amino acid sequence of the polypeptide is greater than about 210, using an HMM based on the amino acid sequences depicted in one of FIGS. 1 to 7. The plant has a difference in the level of biomass as compared to the corresponding level of biomass of a control plant that does not comprise the exogenous nucleic acid. In another aspect, the exogenous nucleic acid comprises a regulatory region operably linked to a nucleotide sequence encoding a polypeptide having 80 percent or greater sequence identity to an amino acid sequence selected from the group consisting of SEQ ID NO: 2, 4, 6, 8, 9, 11, 13, 14, 15, 16, 17, 19, 21, 22, 23, 25, 26, 28, 30, 32, 34, 36, 38, 39, 40, 41, 42, 43, 44, 45, 46, 48, 49, 50, 51, 52, 53, 54, 55, 56, 58, 60, 61, 62, 63, 64, 66, 68, 69, 70, 71, 72, 73, 74, 75, 76, 77, 78, 79, 80, 81, 82, 83, 84, 85, 86, 87, 88, 89, 90, 91, 92, 93, 94, 95, 96, 97, 98, 99, 100, 101, 102, 103, 104, 106, 107, 109, 111, 112, 114, 115, 117, 119, 120, 122, 124, 126, 127, 129, 131, 133, 135, 137, 139, 140, 141, 142, 143, 144, 145, 146, 147, 148, 149, 150, 151, 152, 153, 154, 155, 156, 157, 158, 159, 160, 161, 162, 163, 165, 166, 167, 169, 171, 173, 175, 176, 177, 179, 181, 183, 184, 185, 186, 188, 190, 192, 193, 195, 197, 198, 200, 202, 204, 206, 208, 210, 212, 214, 215, 217, 218, 219, 220, 222, 224, 226, 228, 230, 232, 234, 236, 238, 240, 241, 242, 243, 245, 247, 249, 251, 253, 254, 255, 256, 257, 258, 259, 260, 261, 262, 263, 264, 265, 266, 267, 268, 269, 270, 271, 272, 273, 274, 275, 276, 277, 278, 279, 280, 281, 282, 283, 284, 285, 286, 287, 288, 289, 290, 291, 292, 293, 294, 295, 296, 297, 298, 299, 300, 301, 302, 303, 304, 305, 306, 307, 308, 309, 310, 311, 312, 313, 315, 317, 319, 321, 323, 325, 327, 329, 330, 331, 332, 334, 335, 336, 338, 340, 341, 343, 345, 346, 347, 349, 349, 350, 351, 352, 353, 354, 355, 356, 357, 359, 360, 361, 362, 363, 364, 366, 367, 369, 371, 373, 374, 374, 375, 376, 376, 377, 378, 380, 382, 384, 385, 386, 387, 388, 389, 390, 391, 391, 393, 395, 397, 398, 399, 400, 400, 401, 401, 403, 403, 405, 405, 407, 407, 408, 410, 410, 411, 411, 413, 414, 415, 416, 417, 418, 419, 420, 420, 421, 422, 423, 424, 426, 426, 428, 428, 429, 430, 430, 431, 432, 432, 433, 433, 434, 435, 436, 437, 438, 439, 440, 441, 442, 443, 444, 445, 446, 447, 448, 449, 450, 451, 452, 453, 453, 454, 455, 456, 457, 458, 459, 460, 461, 462, 463, 464, 465, 466, 467, 468, 469, 470, 471, 472, 474, 475, 477, 479, 481, 483, 485, 487, 488, 489, 490, 492, 494, 496, 498, 500, 502, 503, 504, 506, 508, 510, 511, 513, 515, 517, 518, 519, 521, 523, 525, 527, 529, 531, 533, 534, 536, 538, 540, 541, 543, 544, 546, 547, 548, 549, 550, 551, 552, 553, 554, 555, 557, 559, 560, 562, 564, 566, 568, 569, 570, 571, 572, 573, 574, 575, 576, 577, 578, 580, 582, 584, 586, 587, 588, 589, 591, 593, 595, 596, 598, 600, 602, 603, 605, 606, 608, 608, 609, 610, 611, 612, 613, 615, 617, 619, 621, 623, 624, 626, 627, 628, 630, 631, 633, 634, 636, and 638. A plant produced from the plant cell has a difference in the level of biomass as compared to the corresponding level of biomass of a control plant that does not comprise the exogenous nucleic acid. In another aspect, the exogenous nucleic acid comprises a regulatory region operably linked to a nucleotide sequence having 80 percent or greater sequence identity to a nucleotide sequence selected from the group consisting of SEQ ID NO: 3, 5, 7, 10, 12, 18, 20, 24, 27, 29, 31, 33, 35, 37, 47, 57, 59, 65, 67, 105, 108, 110, 113, 116, 118, 121, 123, 125, 128, 130, 132, 134, 136, 138, 164, 168, 170, 172, 174, 178, 180, 182, 187, 189, 191, 194, 196, 199, 201, 203, 205, 207, 209, 211, 213, 216, 221, 223, 225, 227, 229, 231, 233, 235, 237, 239, 244, 246, 248, 250, 252, 314, 316, 318, 320, 322, 324, 326, 328, 333, 337, 339, 342, 344, 348, 358, 365, 368, 370, 372, 379, 381, 383, 392, 394, 396, 402, 404, 406, 409, 412, 425, 427, 473, 476, 478, 480, 482, 484, 486, 491, 493, 495, 497, 499, 501, 505, 507, 509, 512, 514, 516, 520, 522, 524, 526, 528, 530, 532, 535, 537, 539, 542, 556, 558, 561, 563, 565, 567, 579, 581, 583, 585, 590, 592, 594, 597, 599, 601, 604, 607, 614, 616, 618, 620, 622, 625, 629, 632, 635, and 637, or a fragment thereof. A plant produced from the plant cell has a difference in the level of biomass as compared to the corresponding level of biomass of a control plant that does not comprise the exogenous nucleic acid. A transgenic plant comprising such a plant cell is also provided. Also provided is a plant biomass or seed product. The product comprises vegetative or embryonic tissue from a transgenic plant described herein.

[0023] Isolated nucleic acids are also provided. In one aspect, an isolated nucleic acid comprises a nucleotide sequence having 80% or greater sequence identity to the nucleotide sequence set forth in SEQ ID NO: 10, 18, 27, 35, 37, 57, 67, 116, 128, 130, 132, 138, 164, 180, 207, 216, 231, 239, 328, 333, 339, 344, 348, 358, 365, 368, 370, 372, 379, 381, 383, 392, 394, 396, 404, 406, 425, 427, 473, 478, 482, 486, 491, 495, 497, 499, 505, 509, 512, 520, 526, 528, 535, 539, 556, 558, 561, 563, 565, 567, 583, 592, 597, 604, 614, 622, 625, 632, or 637. In another aspect, an isolated nucleic acid comprises a nucleotide sequence encoding a polypeptide having 80% or greater sequence identity to the amino acid sequence set forth in SEQ ID NO: 11, 13, 19, 28, 34, 36, 38, 58, 109, 114, 117, 129, 133, 139, 165, 165, 181, 334, 340, 345, 349, 359, 366, 369, 371, 373, 380, 382, 384, 393, 395, 397, 405, 407, 426, 428, 474, 492, 500, 506, 510, 513, 517, 536, 540, 557, 559, 562, 564, 566, 568, 584, 593, 598, 600, 608, 615, 623, 633, 636, or 638.

[0024] In another aspect, methods of identifying a genetic polymorphism associated with variation in the level of biomass are provided. The methods include providing a population of plants, and determining whether one or more genetic polymorphisms in the population are genetically linked to the locus for a polypeptide selected from the group consisting of the polypeptides depicted in FIGS. 1 to 7 and functional homologs thereof. The correlation between variation in the level of biomass in a tissue in plants of the population and the presence of the one or more genetic polymorphisms in plants of the population is measured, thereby permitting identification of whether or not the one or more genetic polymorphisms are associated with such variation.

[0025] In another aspect, methods of making a plant line are provided. The methods include determining whether one or more genetic polymorphisms in a population of plants is associated with the locus for one or more of the polypeptides depicted in FIGS. 1-7 and functional homologs of such polypeptides. One or more plants in the population is identified in which the presence of at least one of the genetic polymorphism(s) is associated with variation in a biomass trait. The above-described steps can be performed in either order. One or more of the identified plants is then crossed with itself or a different plant to produce seed, and at least one progeny plant grown from such seed is crossed with itself or a different plant. The steps of selfing and outcrossing are repeated for an additional 0-5 generations to make a plant line in which the at least one polymorphism is present. The biomass trait can be yield of dry matter, and the plant population can be switchgrass plants.

[0026] Unless otherwise defined, all technical and scientific terms used herein have the same meaning as commonly understood by one of ordinary skill in the art to which this invention pertains. Although methods and materials similar or equivalent to those described herein can be used to practice the invention, suitable methods and materials are described below. All publications, patent applications, patents, and other references mentioned herein are incorporated by reference in their entirety. In case of conflict, the present specification, including definitions, will control. In addition, the materials, methods, and examples are illustrative only and not intended to be limiting.

[0027] The details of one or more embodiments of the invention are set forth in the accompanying drawings and the description below. Other features, objects, and advantages of the invention will be apparent from the description and drawings, and from the claims. Applicants reserve the right to alternatively claim any disclosed invention using the transitional phrase “comprising,” “consisting essentially of,” or “consisting of,” according to standard practice in patent law.

### DESCRIPTION OF THE DRAWINGS

[0028] FIG. 1 (A-E) is an alignment of the amino acid sequence of CW00012 corresponding to Ceres Clone: 29678 (SEQ ID NO: 2) with homologous and/or orthologous amino acid sequences. In all the alignment figures shown herein, a dash in an aligned sequence represents a gap, i.e., a lack of an amino acid at that position. Identical amino acids or conserved amino acid substitutions among aligned sequences are identified by boxes. FIG. 1 and the other alignment figures provided herein were generated using the program MUSCLE version 3.52.

[0029] FIG. 2 (A-C) is an alignment of the amino acid sequence of CW00212 corresponding to Ceres Clone: 33232 (SEQ ID NO: 106) with homologous and/or orthologous amino acid sequences.

[0030] FIG. 3 (A-B) is an alignment of the amino acid sequence of CW00226 corresponding to Ceres clone158734 (SEQ ID NO: 165) with homologous and/or orthologous amino acid sequences.

[0031] FIG. 4 (A-H) is an alignment of CW00233 corresponding to Ceres annot ID:876994 (SEQ ID NO: 315) with homologous and/or orthologous amino acid sequences.

[0032] FIG. 5 is an alignment of CW00305 corresponding to CeresClone:1554933 (SEQ ID NO: 474) with homologous and/or orthologous amino acid sequences.

[0033] FIG. 6 (A-D) is an alignment of CW00327 corresponding to CeresClone:258841 (SEQ ID NO: 521) with homologous and/or orthologous amino acid sequences.

[0034] FIG. 7 (A-C) is an alignment of CW00539 corresponding to CeresAnnot:863641 (SEQ ID NO: 591) with homologous and/or orthologous amino acid sequences.

### DETAILED DESCRIPTION

[0035] The invention features methods and materials related to modulating biomass levels in plants. In some embodiments, the plants may also have modulated levels of, for example, lignin, modified root architecture, modified herbicide resistance, modified carotenoid biosynthesis, or modulated cell wall content. The methods can include transforming a plant cell with a nucleic acid encoding a biomass-modulating polypeptide, wherein expression of the polypeptide results in a modulated level of biomass. Plant cells produced using such methods can be grown to produce plants having an increased or decreased biomass. Such plants, and the seeds of such plants, may be used to produce, for example, biomass having an increased value as a biofuel feedstock.

### I. DEFINITIONS

[0036] “Amino acid” refers to one of the twenty biologically occurring amino acids and to synthetic amino acids, including D/L optical isomers.

[0037] “Cell type-preferential promoter” or “tissue-preferential promoter” refers to a promoter that drives expression preferentially in a target cell type or tissue, respectively, but may also lead to some transcription in other cell types or tissues as well.

[0038] “Control plant” refers to a plant that does not contain the exogenous nucleic acid present in a transgenic plant of interest, but otherwise has the same or similar genetic background as such a transgenic plant. A suitable control plant can be a non-transgenic wild type plant, a non-transgenic segregant from a transformation experiment, or a transgenic plant that contains an exogenous nucleic acid other than the exogenous nucleic acid of interest.

[0039] “Domains” are groups of substantially contiguous amino acids in a polypeptide that can be used to characterize protein families and/or parts of proteins.

[0040] Such domains have a “fingerprint” or “signature” that can comprise conserved primary sequence, secondary structure, and/or three-dimensional conformation. Generally, domains are correlated with specific in vitro and/or in vivo activities. A domain can have a length of from 10 amino acids to 400 amino acids, e.g., 10 to 50 amino acids, or 25 to 100 amino acids, or 35 to 65 amino acids, or 35 to 55 amino acids, or 45 to 60 amino acids, or 200 to 300 amino acids, or 300 to 400 amino acids.

[0041] “Down-regulation” refers to regulation that decreases production of expression products (mRNA, polypeptide, or both) relative to basal or native states.

[0042] “Exogenous” with respect to a nucleic acid indicates that the nucleic acid is part of a recombinant nucleic acid construct, or is not in its natural environment. For example, an exogenous nucleic acid can be a sequence from one species introduced into another species, i.e., a heterologous nucleic acid. Typically, such an exogenous nucleic acid is introduced into the other species via a recombinant nucleic acid construct. An exogenous nucleic acid can also be a sequence that is native to an organism and that has been reintroduced into cells of that organism. An exogenous nucleic acid that includes a native sequence can often be distinguished from the naturally occurring sequence by the presence of non-natural sequences linked to the exogenous nucleic acid, e.g., non-native regulatory sequences flanking a native sequence in a recombinant nucleic acid construct. In addition, stably transformed exogenous nucleic acids typically are integrated at positions other than the position where the native sequence is found. It will be appreciated that an exogenous nucleic acid may have been introduced into a progenitor and not into the cell under consideration. For example, a transgenic plant containing an exogenous nucleic acid can be the progeny of a cross between a stably transformed plant and a non-transgenic plant. Such progeny are considered to contain the exogenous nucleic acid.

[0043] “Expression” refers to the process of converting genetic information of a polynucleotide into RNA through transcription, which is catalyzed by an enzyme, RNA polymerase, and into protein, through translation of mRNA on ribosomes.

[0044] “Heterologous polypeptide” as used herein refers to a polypeptide that is not a naturally occurring polypeptide in a plant cell, e.g., a transgenic Panicum virgatum plant transformed with and expressing the coding sequence for a nitrogen transporter polypeptide from a Zea mays plant.

[0045] “Isolated nucleic acid” as used herein includes a naturally-occurring nucleic acid, provided one or both of the sequences immediately flanking that nucleic acid in its naturally-occurring genome is removed or absent. Thus, an isolated nucleic acid includes, without limitation, a nucleic acid that exists as a purified molecule or a nucleic acid molecule that is incorporated into a vector or a virus. A nucleic acid existing among hundreds to millions of other nucleic acids within, for example, cDNA libraries, genomic libraries, or gel slices containing a genomic DNA restriction digest, is not to be considered an isolated nucleic acid.

[0046] “Modulation” of the level of biomass refers to the change in the level of the biomass that is observed as a result of expression of, or transcription from, an exogenous nucleic acid in a plant cell and/or plant. The change in level is measured relative to the corresponding level in control plants.

[0047] “Nucleic acid” and “polynucleotide” are used interchangeably herein, and refer to both RNA and DNA, including cDNA, genomic DNA, synthetic DNA, and DNA or RNA containing nucleic acid analogs. A nucleic acid can be double-stranded or single-stranded (i.e., a sense strand or an antisense strand). Non-limiting examples of polynucleotides include genes, gene fragments, exons, introns, messenger RNA (mRNA), transfer RNA, ribosomal RNA, siRNA, micro-RNA, ribozymes, cDNA, recombinant polynucleotides, branched polynucleotides, nucleic acid probes and nucleic acid primers. A polynucleotide may contain unconventional or modified nucleotides.

[0048] “Operably linked” refers to the positioning of a regulatory region and a sequence to be transcribed in a nucleic acid so that the regulatory region is effective for regulating transcription or translation of the sequence. For example, to operably link a coding sequence and a regulatory region, the translation initiation site of the translational reading frame of the coding sequence is typically positioned between one and about fifty nucleotides downstream of the regulatory region. A regulatory region can, however, be positioned as much as about 5,000 nucleotides upstream of the translation initiation site, or about 2,000 nucleotides upstream of the transcription start site.

[0049] “Polypeptide” as used herein refers to a compound of two or more subunit amino acids, amino acid analogs, or other peptidomimetics, regardless of post-translational modification, e.g., phosphorylation or glycosylation. The subunits may be linked by peptide bonds or other bonds such as, for example, ester or ether bonds. Full-length polypeptides, truncated polypeptides, point mutants, insertion mutants, splice variants, chimeric proteins, and fragments thereof are encompassed by this definition.

[0050] “Progeny” includes descendants of a particular plant or plant line. Progeny of an instant plant include seeds formed on F₁, F₂, F₃, F₄, F₅, F₆ and subsequent generation plants, or seeds formed on BC₁, BC₂, BC₃, and subsequent generation plants, or seeds formed on F₁BC₁, F₁BC₂, F₁BC₃, and subsequent generation plants. The designation F₁ refers to the progeny of a cross between two parents that are genetically distinct. The designations F₂, F₃, F₄, F₅ and F₆ refer to subsequent generations of self- or sib-pollinated progeny of an F₁ plant.

[0051] “Regulatory region” refers to a nucleic acid having nucleotide sequences that influence transcription or translation initiation and rate, and stability and/or mobility of a transcription or translation product. Regulatory regions include, without limitation, promoter sequences, enhancer sequences, response elements, protein recognition sites, inducible elements, protein binding sequences, 5′ and 3′ untranslated regions (UTRs), transcriptional start sites, termination sequences, polyadenylation sequences, introns, and combinations thereof. A regulatory region typically comprises at least a core (basal) promoter. A regulatory region also may include at least one control element, such as an enhancer sequence, an upstream element or an upstream activation region (UAR). For example, a suitable enhancer is a cis-regulatory element (−212 to −154) from the upstream region of the octopine synthase (ocs) gene. Fromm et al., The Plant Cell, 1:977-984 (1989).

[0052] “Up-regulation” refers to regulation that increases the level of an expression product (mRNA, polypeptide, or both) relative to basal or native states.

[0053] “Vector” refers to a replicon, such as a plasmid, phage, or cosmid, into which another DNA segment may be inserted so as to bring about the replication of the inserted segment. Generally, a vector is capable of replication when associated with the proper control elements. The term “vector” includes cloning and expression vectors, as well as viral vectors and integrating vectors. An “expression vector” is a vector that includes a regulatory region.

### II. POLYPEPTIDES

[0054] Polypeptides described herein include biomass-modulating polypeptides. Biomass-modulating polypeptides can be effective to modulate biomass levels when expressed in a plant or plant cell. Such polypeptides typically contain at least one domain indicative of biomass-modulating polypeptides, as described in more detail herein. biomass-modulating polypeptides typically have an HMM bit score that is greater than 210, as described in more detail herein. In some embodiments, biomass-modulating polypeptides have greater than 80% identity to SEQ ID NOs: 2, 4, 6, 8, 9, 11, 13, 14, 15, 16, 17, 19, 21, 22, 23, 25, 26, 28, 30, 32, 34, 36, 38, 39, 40, 41, 42, 43, 44, 45, 46, 48, 49, 50, 51, 52, 53, 54, 55, 56, 58, 60, 61, 62, 63, 64, 66, 68, 69, 70, 71, 72, 73, 74, 75, 76, 77, 78, 79, 80, 81, 82, 83, 84, 85, 86, 87, 88, 89, 90, 91, 92, 93, 94, 95, 96, 97, 98, 99, 100, 101, 102, 103, 104, 106, 107, 109, 111, 112, 114, 115, 117, 119, 120, 122, 124, 126, 127, 129, 131, 133, 135, 137, 139, 140, 141, 142, 143, 144, 145, 146, 147, 148, 149, 150, 151, 152, 153, 154, 155, 156, 157, 158, 159, 160, 161, 162, 163, 165, 166, 167, 169, 171, 173, 175, 176, 177, 179, 181, 183, 184, 185, 186, 188, 190, 192, 193, 195, 197, 198, 200, 202, 204, 206, 208, 210, 212, 214, 215, 217, 218, 219, 220, 222, 224, 226, 228, 230, 232, 234, 236, 238, 240, 241, 242, 243, 245, 247, 249, 251, 253, 254, 255, 256, 257, 258, 259, 260, 261, 262, 263, 264, 265, 266, 267, 268, 269, 270, 271, 272, 273, 274, 275, 276, 277, 278, 279, 280, 281, 282, 283, 284, 285, 286, 287, 288, 289, 290, 291, 292, 293, 294, 295, 296, 297, 298, 299, 300, 301, 302, 303, 304, 305, 306, 307, 308, 309, 310, 311, 312, 313, 315, 317, 319, 321, 323, 325, 327, 329, 330, 331, 332, 334, 335, 336, 338, 340, 341, 343, 345, 346, 347, 349, 349, 350, 351, 352, 353, 354, 355, 356, 357, 359, 360, 361, 362, 363, 364, 366, 367, 369, 371, 373, 374, 374, 375, 376, 376, 377, 378, 380, 382, 384, 385, 386, 387, 388, 389, 390, 391, 391, 393, 395, 397, 398, 399, 400, 401, 403, 405, 407, 408, 410, 411, 413, 414, 415, 416, 417, 418, 419, 420, 421, 422, 423, 424, 426, 428, 429, 430, 431, 432, 433, 434, 435, 436, 437, 438, 439, 440, 441, 442, 443, 444, 445, 446, 447, 448, 449, 450, 451, 452, 453, 453, 454, 455, 456, 457, 458, 459, 460, 461, 462, 463, 464, 465, 466, 467, 468, 469, 470, 471, 472, 474, 475, 477, 479, 481, 483, 485, 487, 488, 489, 490, 492, 494, 496, 498, 500, 502, 503, 504, 506, 508, 510, 511, 513, 515, 517, 518, 519, 521, 523, 525, 527, 529, 531, 533, 534, 536, 538, 540, 541, 543, 544, 546, 547, 548, 549, 550, 551, 552, 553, 554, 555, 557, 559, 560, 562, 564, 566, 568, 569, 570, 571, 572, 573, 574, 575, 576, 577, 578, 580, 582, 584, 586, 587, 588, 589, 591, 593, 595, 596, 598, 600, 602, 603, 605, 606, 608, 608, 609, 610, 611, 612, 613, 615, 617, 619, 621, 623, 624, 626, 627, 628, 630, 631, 633, 634, 636, or 638, as described in more detail herein.

[0055] A. Domains Indicative of Biomass-Modulating Polypeptides

[0056] A biomass-modulating polypeptide can contain a polyprenyl synthetase domain, which is predicted to be characteristic of an polyprenyl synthetase enzyme. A polyprenyl synthetase is a variety of isoprenoid compound which can be synthesized by various organisms. For example, in eukaryotes the isoprenoid biosynthetic pathway can be responsible for the synthesis of a variety of end products including cholesterol, dolichol, ubiquinone or coenzyme Q. In bacteria, this pathway can lead to the synthesis of isopentenyl tRNA, isoprenoid quinones, and sugar carrier lipids. Among the enzymes that can participate in that pathway, are a number of polyprenyl synthetase enzymes which catalyze a 1′4-condensation between 5 carbon isoprene units. All the above enzymes typically share some regions of sequence similarity. Two of these regions are typically rich in aspartic-acid residues and could be involved in the catalytic mechanism and/or the binding of the substrates. SEQ ID NO: 2 sets forth the amino acid sequence of an Arabidopsis clone, identified herein as CeresClone: 29678 (SEQ ID NO: 2), that is predicted to encode a polypeptide containing a polyprenyl synthetase domain. For example, a biomass-modulating polypeptide can comprise a polyprenyl synthetase domain having 60 percent or greater sequence identity to residues 93 to 356 of SEQ ID NO: 2. In some embodiments, a biomass-modulating polypeptide can comprise a polyprenyl synthetase domain having 60 percent or greater sequence identity to the polyprenyl synthetase domain of one or more of the polypeptides set forth in SEQ ID NOs: 2, 4, 6, 8, 9, 11, 13, 14, 15, 16, 17, 19, 21, 22, 23, 25, 26, 28, 30, 32, 34, 36, 38, 39, 40, 41, 42, 43, 44, 45, 46, 48, 49, 50, 51, 52, 53, 54, 55, 56, 58, 60, 61, 62, 63, 64, 66, 68, 69, 70, 71, 72, 73, 74, 75, 76, 77, 78, 79, 80, 81, 82, 83, 84, 85, 86, 87, 88, 89, 90, 91, 92, 93, 94, 95, 96, 97, 98, 99, 100, 101, 102, 103, or 104. The polyprenyl synthetase domains of such sequences are set forth in the Sequence Listing.

[0057] A biomass-modulating polypeptide can contain a multiprotein bridging factor 1 domain. This domain forms a heterodimer with MBF2. It can make direct contact with the TATA-box binding protein (TBP) and can interact with Ftz-F1, stabilising the Ftz-F1-DNA complex. It can also be found in the endothelial differentiation-related factor (EDF-1). The domain can be found in a wide range of eukaryotic proteins including metazoans, fungi and plants. A helix-turn-helix motif (PF01381) is typically found to its C-terminus.

The domain is also present in SEQ ID NO: 165, which sets forth the amino acid sequence of an Arabidopsis clone, identified herein as Ceres clone: 158734 (SEQ ID NO: 165), that is predicted to encode a polypeptide containing a multiprotein bridging factor 1 domain. For example, a biomass-modulating polypeptide can comprise a multiprotein bridging factor 1 domain having 60 percent or greater sequence identity to residues 11 to 83 of SEQ ID NO: 165. In some embodiments, a biomass-modulating polypeptide can comprise a multiprotein bridging factor 1 domain having 60 percent or greater sequence identity to the multiprotein bridging factor 1 domain of one or more of the polypeptides set forth in SEQ ID NOs: 165, 166, 167, 169, 171, 173, 175, 176, 177, 179, 181, 183, 184, 185, 186, 188, 190, 192, 193, 195, 197, 198, 200, 202, 204, 206, 208, 210, 212, 214, 215, 217, 218, 219, 220, 222, 224, 226, 228, 230, 232, 234, 236, 238, 240, 241, 242, 243, 245, 247, 249, 251, 253, 254, 255, 256, 257, 258, 259, 260, 261, 262, 263, 264, 265, 266, 267, 268, 269, 270, 271, 272, 273, 274, 275, 276, 277, 278, 279, 280, 281, 282, 283, 284, 285, 286, 287, 288, 289, 290, 291, 292, 293, 294, 295, 296, 297, 298, 299, 300, 301, 302, 303, 304, 305, 306, 307, 308, 309, 310, 311, 312, or 313. The multiprotein bridging factor 1 domains of such sequences are set forth in the Sequence Listing.

[0058] A biomass-modulating polypeptide can contain a Helix-turn-helix 3 domain. The domain is also present in SEQ ID NO: 165, which sets forth the amino acid sequence of an Arabidopsis clone, identified herein as Ceres clone: 158734 (SEQ ID NO: 165), that is predicted to encode a polypeptide containing a Helix-turn-helix 3 domain. This is large family of DNA binding helix-turn helix proteins that include a bacterial plasmid copy control protein, bacterial methylases, various bacteriophage transcription control proteins and a vegetative specific protein from Dictyostelium discoideum (Slime mould). For example, a biomass-modulating polypeptide can comprise a Helix-turn-helix 3 domain having 60 percent or greater sequence identity to residues 91 to 145 of SEQ ID NO: 165. In some embodiments, a biomass-modulating polypeptide can comprise a Helix-turn-helix 3 domain having 60 percent or greater sequence identity to the Helix-turn-helix 3 domain of one or more of the polypeptides set forth in SEQ ID NOs: 165, 166, 167, 169, 171, 173, 175, 176, 177, 179, 181, 183, 184, 185, 186, 188, 190, 192, 193, 195, 197, 198, 200, 202, 204, 206, 208, 210, 212, 214, 215, 217, 218, 219, 220, 222, 224, 226, 228, 230, 232, 234, 236, 238, 240, 241, 242, 243, 245, 247, 249, 251, 253, 254, 255, 256, 257, 258, 259, 260, 261, 262, 263, 264, 265, 266, 267, 268, 269, 270, 271, 272, 273, 274, 275, 276, 277, 278, 279, 280, 281, 82, 283, 284, 285, 286, 287, 288, 289, 290, 291, 292, 293, 294, 295, 296, 297, 298, 299, 300, 301, 302, 303, 304, 305, 306, 306, 307, 308, 309, 310, 310, 311, 312, or 313. The Helix-turn-helix 3 domains of such sequences are set forth in the Sequence Listing.

[0059] A biomass-modulating polypeptide can contain a plant neutral invertase domain. The motif is also present in SEQ ID NO: 315, which sets forth the amino acid sequence of an Arabidopsis clone, identified herein as Ceres annot: 876994 (SEQ ID NO: 315), that is predicted to encode a polypeptide containing a plant neutral invertase domain.

This family of domains represents a number of plant neutral invertases (e.g., EC.2.1.26). This family is a member of clan GDE (CL0211), which contains the following 4 members: Bac_rhamnosid, GDE_C, Invertase_neut, and Trehalase. For example, a biomass-modulating polypeptide can comprise a plant neutral invertase domain having 60 percent or greater sequence identity to residues 84 to 551 of SEQ ID NO: 315. In some embodiments, a biomass-modulating polypeptide can comprise a plant neutral invertase domain having 60 percent or greater sequence identity to the plant neutral invertase domain of one or more of the polypeptides set forth in SEQ ID NOs: 315, 317, 319, 321, 323, 325, 327, 329, 330, 331, 332, 334, 335, 336, 338, 340, 341, 343, 345, 346, 347, 349, 349, 350, 351, 352, 353, 354, 355, 356, 357, 359, 360, 361, 362, 363, 364, 366, 367, 369, 371, 373, 374, 374, 375, 376, 376, 377, 378, 380, 382, 384, 385, 386, 387, 388, 389, 390, 391, 393, 395, 397, 398, 399, 400, 401, 403, 405, 407, 408, 410, 411, 413, 414, 415, 416, 417, 418, 419, 420, 421, 422, 423, 424, 426, 428, 429, 430, 431, 432, 433, 434, 435, 436, 437, 438, 439, 440, 441, 442, 443, 444, 445, 446, 447, 448, 449, 450, 451, 452, 453, 454, 455, 456, 457, 458, 459, 460, 461, 462, 463, 464, 465, 466, 467, 468, 469, 470, 471, or 472. The plant neutral invertase domains of such sequences are set forth in the Sequence Listing.

[0060] A biomass-modulating polypeptide can contain a sedlin, N-terminal domain. The domain is also present in SEQ ID NO: 474, which sets forth the amino acid sequence of an Zea mays clone, identified herein as Ceres Clone:1554933 (SEQ ID NO: 474), that is predicted to encode a polypeptide containing a sedlin, N-terminal domain. Sedlin is a 140 amino-acid protein with a role in endoplasmic reticulum-to-Golgi transport. For example, a biomass-modulating polypeptide can comprise a sedlin, N-terminal domain having 60 percent or greater sequence identity to residues 9 to 126 of SEQ ID NO: 474. In some embodiments, a biomass-modulating polypeptide can comprise a sedlin, N-terminal domain having 60 percent or greater sequence identity to the sedlin, N-terminal domain of one or more of the polypeptides set forth in SEQ ID NOs: 474, 475, 477, 479, 481, 483, 485, 487, 488, 489, 490, 492, 494, 496, 498, 500, 502, 503, 504, 506, 508, 510, 511, 513, 515, 517, 518, or 519. The sedlin, N-terminal domains of such sequences are set forth in the Sequence Listing.

[0061] A biomass-modulating polypeptide can contain a G-box binding protein MFMR. The domain is also present in SEQ ID NO: 521, which sets forth the amino acid sequence of an Zea mays clone, identified herein as Ceres Clone:258841 (SEQ ID NO: 521), that is predicted to encode a polypeptide containing a G-box binding protein MFMR domain. This region is typically found to the N-terminus of the PF00170 transcription factor domain. It is typically between 150 and 200 amino acids in length. The N-terminal half is typically rather rich in proline residues and has been termed the PRD (proline rich domain) whereas the C-terminal half is typically more polar and has been called the MFMR (multifunctional mosaic region). This family may be composed of three sub-families called A, B and C classified according to motif composition. Some of these motifs may be involved in mediating protein-protein interactions. The MFMR region can contain a nuclear localisation signal in bZIP opaque and GBF-2. The MFMR also can contain a transregulatory activity in TAF-1. The MFMR in CPRF-2 can contain cytoplasmic retention signals. For example, a biomass-modulating polypeptide can comprise a G-box binding protein MFMR domain having 60 percent or greater sequence identity to residues 1 to 188 of SEQ ID NO: 521. In some embodiments, a biomass-modulating polypeptide can comprise a G-box binding protein MFMR domain having 60 percent or greater sequence identity to the G-box binding protein MFMR domain of one or more of the polypeptides set forth in SEQ ID NOs: 521, 523, 525, 527, 529, 531, 533, 534, 536, 538, 540, 541, 543, 544, 545, 546, 547, 548, 549, 550, 551, 552, 553, 554, 555, 557, 559, 560, 562, 564, 566, 568, 569, 570, 571, 572, 573, 574, 575, 576, 577, 578, 580, 582, 584, 586, 587, 588, or 589. The G-box binding protein MFMR domains of such sequences are set forth in the Sequence Listing.

[0062] A biomass-modulating polypeptide can contain a bZIP_{—}1 transcription factor.

[0063] The domain is also present in SEQ ID NO: 521, which sets forth the amino acid sequence of an Zea mays clone, identified herein as Ceres Clone:258841 (SEQ ID NO: 521), that is predicted to encode a polypeptide containing a bZIP_{—}1 transcription factor domain. The basic-leucine zipper (bZIP) transcription factors of eukaryotic cells are proteins that contain a basic region mediating sequence-specific DNA-binding followed by a leucine zipper region required for dimerization. For example, a biomass-modulating polypeptide can comprise a bZIP_{—}1 transcription factor domain having 60 percent or greater sequence identity to residues 279 to 342 of SEQ ID NO: 521. In some embodiments, a biomass-modulating polypeptide can comprise a bZIP_{—}1 transcription factor domain having 60 percent or greater sequence identity to the bZIP_{—}1 transcription factor domain of one or more of the polypeptides set forth in SEQ ID NOs: 521, 523, 525, 527, 529, 531, 533, 534, 536, 538, 540, 541, 543, 544, 545, 546, 547, 548, 549, 550, 551, 552, 553, 554, 555, 557, 559, 560, 562, 564, 566, 568, 569, 570, 571, 572, 573, 574, 575, 576, 577, 578, 580, 582, 584, 586, 587, 588, or 589. The bZIP_{—}1 transcription factor domains of such sequences are set forth in the Sequence Listing.

[0064] A biomass-modulating polypeptide can contain a bZIP_{—}2 basic region leucine zipper domain. The domain is also present in SEQ ID NO: 521, which sets forth the amino acid sequence of an Zea mays clone, identified herein as Ceres Clone:258841 (SEQ ID NO: 521), that is predicted to encode a polypeptide containing a bZIP_{—}2 basic region leucine zipper. The basic-leucine zipper (bZIP) transcription factors of eukaryotic cells are proteins that contain a basic region mediating sequence-specific DNA-binding followed by a leucine zipper region required for dimerization. For example, a biomass-modulating polypeptide can comprise a bZIP_{—}2 basic region leucine zipper domain having 60 percent or greater sequence identity to residues 279 to 333 of SEQ ID NO: 521. In some embodiments, a biomass-modulating polypeptide can comprise a bZIP_{—}2 basic region leucine zipper domain having 60 percent or greater sequence identity to the bZIP_{—}2 basic region leucine zipper domain of one or more of the polypeptides set forth in SEQ ID NOs: 521, 523, 525, 527, 529, 531, 533, 534, 536, 538, 540, 541, 543, 544, 545, 546, 547, 548, 549, 550, 551, 552, 553, 554, 555, 557, 559, 560, 562, 564, 566, 568, 569, 570, 571, 572, 573, 574, 575, 576, 577, 578, 580, 582, 584, 586, 587, 588, or 589. The bZIP_{—}2 basic region leucine zipper domains of such sequences are set forth in the Sequence Listing.

[0065] A biomass-modulating polypeptide can contain an epimerase domain. The domain is also present in SEQ ID NO: 591, which sets forth the amino acid sequence of an Arabidopsis clone, identified herein as Ceres Annot:863641 (SEQ ID NO: 591), that is predicted to encode a polypeptide containing an epimerase domain. An epimerase domain is typical of a family of proteins that typically utilise NAD as a cofactor. The proteins in this family can use nucleotide-sugar substrates for a variety of chemical reactions. The proteins in this family can use nucleotide-sugar substrates for a variety of chemical reactions. For example, a biomass-modulating polypeptide can comprise an epimerase domain having 60 percent or greater sequence identity to residues 20 to 290 of SEQ ID NO: 591. In some embodiments, a biomass-modulating polypeptide can comprise an epimerase domain having 60 percent or greater sequence identity to the epimerase domain of one or more of the polypeptides set forth in SEQ ID NOs: 591, 593, 595, 596, 598, 600, 602, 603, 605, 606, 608, 609, 610, 611, 612, 613, 615, 617, 619, 621, 623, 624, 626, 627, 628, 630, 631, 633, 634, 636, or 638. The epimerase domains of such sequences are set forth in the Sequence Listing.

[0066] In some embodiments, a biomass-modulating polypeptide is truncated at the amino- or carboxy-terminal end of a naturally occurring polypeptide. A truncated polypeptide may retain certain domains of the naturally occurring polypeptide while lacking others. Thus, length variants that are up to 5 amino acids shorter or longer typically exhibit the biomass-modulating activity of a truncated polypeptide. In some embodiments, a truncated polypeptide is a dominant negative polypeptide. Expression in a plant of such a truncated polypeptide confers a difference in the level of biomass of a plant as compared to the corresponding level of a control plant that does not comprise the truncation.

[0067] B. Functional Homologs Identified by Reciprocal BLAST

[0068] In some embodiments, one or more functional homologs of a reference biomass-modulating polypeptide defined by one or more of the Pfam descriptions indicated above are suitable for use as biomass-modulating polypeptides. A functional homolog is a polypeptide that has sequence similarity to a reference polypeptide, and that carries out one or more of the biochemical or physiological function(s) of the reference polypeptide. A functional homolog and the reference polypeptide may be natural occurring polypeptides, and the sequence similarity may be due to convergent or divergent evolutionary events. As such, functional homologs are sometimes designated in the literature as homologs, or orthologs, or paralogs. Variants of a naturally occurring functional homolog, such as polypeptides encoded by mutants of a wild type coding sequence, may themselves be functional homologs. Functional homologs can also be created via site-directed mutagenesis of the coding sequence for a biomass-modulating polypeptide, or by combining domains from the coding sequences for different naturally-occurring biomass-modulating polypeptides (“domain swapping”). The term “functional homolog” is sometimes applied to the nucleic acid that encodes a functionally homologous polypeptide.

[0069] Functional homologs can be identified by analysis of nucleotide and polypeptide sequence alignments. For example, performing a query on a database of nucleotide or polypeptide sequences can identify homologs of biomass-modulating polypeptides. Sequence analysis can involve BLAST, Reciprocal BLAST, or PSI-BLAST analysis of nonredundant databases using a biomass-modulating polypeptide amino acid sequence as the reference sequence. Amino acid sequence is, in some instances, deduced from the nucleotide sequence. Those polypeptides in the database that have greater than 40% sequence identity are candidates for further evaluation for suitability as a biomass-modulating polypeptide. Amino acid sequence similarity allows for conservative amino acid substitutions, such as substitution of one hydrophobic residue for another or substitution of one polar residue for another. If desired, manual inspection of such candidates can be carried out in order to narrow the number of candidates to be further evaluated. Manual inspection can be performed by selecting those candidates that appear to have domains present in biomass-modulating polypeptides, e.g., conserved functional domains.

[0070] Conserved regions can be identified by locating a region within the primary amino acid sequence of a biomass-modulating polypeptide that is a repeated sequence, forms some secondary structure (e.g., helices and beta sheets), establishes positively or negatively charged domains, or represents a protein motif or domain. See, e.g., the Pfam web site describing consensus sequences for a variety of protein motifs and domains on the World Wide Web at sanger.ac.uk/Software/Pfam/ and pfam.janelia.org/. A description of the information included at the Pfam database is described in Sonnhammer et al., Nucl. Acids Res., 26:320-322 (1998); Sonnhammer et al., Proteins, 28:405-420 (1997); and Bateman et al., Nucl. Acids Res., 27:260-262 (1999). Conserved regions also can be determined by aligning sequences of the same or related polypeptides from closely related species. Closely related species preferably are from the same family. In some embodiments, alignment of sequences from two different species is adequate.

[0071] Typically, polypeptides that exhibit at least about 40% amino acid sequence identity are useful to identify conserved regions. Conserved regions of related polypeptides exhibit at least 45% amino acid sequence identity (e.g., at least 50%, at least 60%, at least 70%, at least 80%, or at least 90% amino acid sequence identity). In some embodiments, a conserved region exhibits at least 92%, 94%, 96%, 98%, or 99% amino acid sequence identity.

[0072] Examples of amino acid sequences of functional homologs of the polypeptide set forth in SEQ ID NO: 2 are provided in FIG. 1 and in the Sequence Listing. Such functional homologs include, for example, CeresClone:36701 (SEQ ID NO: 4), CeresClone:36311 (SEQ ID NO: 6), CeresClone:581754 (SEQ ID NO: 8), GI:34484306 (SEQ ID NO: 9), CeresClone:1894727 (SEQ ID NO: 11), CeresAnnot:1487885 (SEQ ID NO: 13), GI:13431547 (SEQ ID NO: 14), GI:75250205 (SEQ ID NO: 15), GI:82547882 (SEQ ID NO: 16), GI:46241274 (SEQ ID NO: 17), CeresAnnot:6023904 (SEQ ID NO: 19), CeresClone:753701 (SEQ ID NO: 21), GI:157348194 (SEQ ID NO: 22), GI:6449052 (SEQ ID NO: 23), CeresClone:1811354 (SEQ ID NO: 25), GI:115473007 (SEQ ID NO: 26), CeresClone:1856050 (SEQ ID NO: 28), CeresAnnot:1457156 (SEQ ID NO: 30), CeresAnnot:1449371 (SEQ ID NO: 32), CeresAnnot:1445504 (SEQ ID NO: 34), CeresAnnot:1460575 (SEQ ID NO: 36), CeresAnnot:1450618 (SEQ ID NO: 38), GI:15231881 (SEQ ID NO: 39), GI:26450928 (SEQ ID NO: 40), GI:15232010 (SEQ ID NO: 41), GI:62320250 (SEQ ID NO: 42), GI:15234534 (SEQ ID NO: 43), GI:413730 (SEQ ID NO: 44), GI:15224197 (SEQ ID NO: 45), GI:15224199 (SEQ ID NO: 46), CeresClone:590924 (SEQ ID NO: 48), GI:558925 (SEQ ID NO: 49), GI:164605012 (SEQ ID NO: 50), GI:4958918 (SEQ ID NO: 51), GI:4958920 (SEQ ID NO: 52), GI:13431546 (SEQ ID NO: 53), GI:121145 (SEQ ID NO: 54), GI:3885426 (SEQ ID NO: 55), GI:14422402 (SEQ ID NO: 56), CeresAnnot:8659367 (SEQ ID NO: 58), CeresAnnot:8681395 (SEQ ID NO: 60), GI:9971808 (SEQ ID NO: 61), GI:147843373 (SEQ ID NO: 62), GI:157335383 (SEQ ID NO: 63), GI:157336281 (SEQ ID NO: 64), CeresClone:1796324 (SEQ ID NO: 66), CeresClone:1819213 (SEQ ID NO: 68), GI:18146809 (SEQ ID NO: 69), GI:41059107 (SEQ ID NO: 70), GI:87299435 (SEQ ID NO: 71), GI:22535957 (SEQ ID NO: 72), GI:22535959 (SEQ ID NO: 73), GI:17352451 (SEQ ID NO: 74), GI:158104429 (SEQ ID NO: 75), GI:79154586 (SEQ ID NO: 76), GI:79154639 (SEQ ID NO: 77), GI:4322331 (SEQ ID NO: 78), GI:6277254 (SEQ ID NO: 79), GI:6277256 (SEQ ID NO: 80), GI:56122554 (SEQ ID NO: 81), GI:56122559 (SEQ ID NO: 82), GI:20386366 (SEQ ID NO: 83), GI:20386368 (SEQ ID NO: 84), GI:58201026 (SEQ ID NO: 85), GI:88910043 (SEQ ID NO: 86), GI:145352919 (SEQ ID NO: 87), GI:87124785 (SEQ ID NO: 88), GI:88808953 (SEQ ID NO: 89), GI:22297564 (SEQ ID NO: 90), GI:16329282 (SEQ ID NO: 91), GI:33863380 (SEQ ID NO: 92), GI:78184316 (SEQ ID NO: 93), GI:119489387 (SEQ ID NO: 94), GI:124026221 (SEQ ID NO: 95), GI:159030944 (SEQ ID NO: 96), GI:11467424 (SEQ ID NO: 97), GI:126696514 (SEQ ID NO: 98), GI:145620854 (SEQ ID NO: 99), GI:33861626 (SEQ ID NO: 100), GI:110599112 (SEQ ID NO: 101), GI:117924356 (SEQ ID NO: 102), GI:39996864 (SEQ ID NO: 103), or GI:77919267 (SEQ ID NO: 104). In some cases, a functional homolog of SEQ ID NO: 2 has an amino acid sequence with at least 45% sequence identity, e.g., 50%, 52%, 56%, 59%, 61%, 65%, 70%, 75%, 80%, 85%, 90%, 95%, 97%, 98%, or 99% sequence identity, to the amino acid sequence set forth in SEQ ID NO: 2.

[0073] Examples of amino acid sequences of functional homologs of the polypeptide set forth in SEQ ID NO: 106 are provided in FIG. 2 and in the Sequence Listing. Such functional homologs include, for example, GI:159472210 (SEQ ID NO: 107), CeresAnnot:1504045 (SEQ ID NO: 109), CeresClone:572174 (SEQ ID NO: 111), GI:58198163 (SEQ ID NO: 112), CeresAnnot:1450983 (SEQ ID NO: 114), GI:118487460 (SEQ ID NO: 115), CeresAnnot:1469397 (SEQ ID NO: 117), CeresAnnot:859452 (SEQ ID NO: 119), GI:21592852 (SEQ ID NO: 120), CeresAnnot:884039 (SEQ ID NO: 122), CeresClone:38304 (SEQ ID NO: 124), CeresClone:467904 (SEQ ID NO: 126), GI:124360157 (SEQ ID NO: 127), CeresAnnot:8454475 (SEQ ID NO: 129), CeresAnnot:8703127 (SEQ ID NO: 131), CeresAnnot:8666968 (SEQ ID NO: 133), CeresClone:238400 (SEQ ID NO: 135), CeresClone:338909 (SEQ ID NO: 137), CeresClone:1728626 (SEQ ID NO: 139), GI:157345039 (SEQ ID NO: 140), GI:147815273 (SEQ ID NO: 141), GI:157359875 (SEQ ID NO: 142), GI:125526023 (SEQ ID NO: 143), GI:58531976 (SEQ ID NO: 144), GI:125591796 (SEQ ID NO: 145), GI:115436670 (SEQ ID NO: 146), GI:125570472 (SEQ ID NO: 147), GI:116056026 (SEQ ID NO: 148), GI:58198153 (SEQ ID NO: 149), GI:145355993 (SEQ ID NO: 150), (SEQ ID NO: 151), (SEQ ID NO: 152), (SEQ ID NO: 153), (SEQ ID NO: 154), EV091145 (SEQ ID NO: 155), DW088645 (SEQ ID NO: 156), EX088422 (SEQ ID NO: 157), EV189515 (SEQ ID NO: 158), EY943890 (SEQ ID NO: 159), DW088842 (SEQ ID NO: 160), EV534950 (SEQ ID NO: 161), ES337067 (SEQ ID NO: 162), or AY873990 (SEQ ID NO: 163). In some cases, a functional homolog of SEQ ID NO: 106 has an amino acid sequence with at least 45% sequence identity, e.g., 50%, 52%, 56%, 59%, 61%, 65%, 70%, 75%, 80%, 85%, 90%, 95%, 97%, 98%, or 99% sequence identity, to the amino acid sequence set forth in SEQ ID NO: 106.

[0074] Examples of amino acid sequences of functional homologs of the polypeptide set forth in SEQ ID NO: 165 are provided in FIG. 3 and in the Sequence Listing. Such functional homologs include, for example, GI:159483353 (SEQ ID NO: 166), GI:116781877 (SEQ ID NO: 167), CeresClone:1628154 (SEQ ID NO: 169), CeresClone:1836022 (SEQ ID NO: 171), CeresAnnot:1477956 (SEQ ID NO: 173), CeresClone:1077443 (SEQ ID NO: 175), GI:1632831 (SEQ ID NO: 176), GI:5669634 (SEQ ID NO: 177), CeresAnnot:8743195 (SEQ ID NO: 179), Ceres P Clone:101144543 (SEQ ID NO: 181), CeresClone:1732715 (SEQ ID NO: 183), GI:157342830 (SEQ ID NO: 184), GI:115468750 (SEQ ID NO: 185), GI:116785703 (SEQ ID NO: 186), CeresClone:1833747 (SEQ ID NO: 188), CeresClone:1896466 (SEQ ID NO: 190), CeresAnnot:1482906 (SEQ ID NO: 192), GI:118485147 (SEQ ID NO: 193), CeresAnnot:1519958 (SEQ ID NO: 195), CeresAnnot:1466623 (SEQ ID NO: 197), GI:15230125 (SEQ ID NO: 198), CeresClone:39345 (SEQ ID NO: 200), CeresClone:946651 (SEQ ID NO: 202), CeresClone:1085665 (SEQ ID NO: 204), CeresClone:474636 (SEQ ID NO: 206), CeresClone:1614765 (SEQ ID NO: 208), CeresClone:1027534 (SEQ ID NO: 210), CeresClone:1049407 (SEQ ID NO: 212), CeresClone:1075173 (SEQ ID NO: 214), GI:117574665 (SEQ ID NO: 215), CeresAnnot:8457163 (SEQ ID NO: 217), GI:109288140 (SEQ ID NO: 218), GI:20086364 (SEQ ID NO: 219), GI:8895787 (SEQ ID NO: 220), CeresAnnot:8709723 (SEQ ID NO: 222), CeresClone:638938 (SEQ ID NO: 224), CeresClone:1031619 (SEQ ID NO: 226), CeresClone:685323 (SEQ ID NO: 228), CeresClone:683522 (SEQ ID NO: 230), Ceres P Clone:101136883 (SEQ ID NO: 232), CeresClone:348434 (SEQ ID NO: 234), CeresClone:1377080 (SEQ ID NO: 236), CeresClone:1159254 (SEQ ID NO: 238), CeresClone:417073 (SEQ ID NO: 240), GI:147852829 (SEQ ID NO: 241), GI:147865629 (SEQ ID NO: 242), GI:147777777 (SEQ ID NO: 243), CeresClone:1607224 (SEQ ID NO: 245), CeresClone:1609842 (SEQ ID NO: 247), CeresClone:2030861 (SEQ ID NO: 249), CeresClone:1875246 (SEQ ID NO: 251), CeresClone:1764141 (SEQ ID NO: 253), GI:115476102 (SEQ ID NO: 254), GI:19225065 (SEQ ID NO: 255), BX822592 (SEQ ID NO: 257), DR234115 (SEQ ID NO: 258), EL589037 (SEQ ID NO: 259), FD566230 (SEQ ID NO: 260), EX895802 (SEQ ID NO: 261), CD824249 (SEQ ID NO: 262), ES914361 (SEQ ID NO: 263), FD953773 (SEQ ID NO: 264), ES264137 (SEQ ID NO: 265), DR234111 (SEQ ID NO: 266), EE417608 (SEQ ID NO: 267), AM730131 (SEQ ID NO: 268), BW598058 (SEQ ID NO: 269), DT018442 (SEQ ID NO: 270), CK755926 (SEQ ID NO: 271), CF517682 (SEQ ID NO: 272), CF517596 (SEQ ID NO: 273), EH701015 (SEQ ID NO: 274), EH709076 (SEQ ID NO: 275), CV881605 (SEQ ID NO: 276), DW101014 (SEQ ID NO: 277), DB938705 (SEQ ID NO: 278), DW071774 (SEQ ID NO: 279), CN868205 (SEQ ID NO: 280), BW606099 (SEQ ID NO: 281), DX491679 (SEQ ID NO: 282), CN909317 (SEQ ID NO: 283), CO576745 (SEQ ID NO: 284), CB347147 (SEQ ID NO: 285), BW615679 (SEQ ID NO: 286), BQ594558 (SEQ ID NO: 287), CT543278 (SEQ ID NO: 288), BP531744 (SEQ ID NO: 289), DY827040 (SEQ ID NO: 290), EX328884 (SEQ ID NO: 291), DY826487 (SEQ ID NO: 292), EX310992 (SEQ ID NO: 293), DR513090 (SEQ ID NO: 294), EX333956 (SEQ ID NO: 295), DR081329 (SEQ ID NO: 296), ES890011 (SEQ ID NO: 297), CB346943 (SEQ ID NO: 298), BG275592 (SEQ ID NO: 299), BX254073 (SEQ ID NO: 300), DR531251 (SEQ ID NO: 301), BP890754 (SEQ ID NO: 302), BW988808 (SEQ ID NO: 303), BE131423 (SEQ ID NO: 304), CO161904 (SEQ ID NO: 305), EB695134 (SEQ ID NO: 306), CN495585 (SEQ ID NO: 307), CV883104 (SEQ ID NO: 308), FC456374 (SEQ ID NO: 309), EX310578 (SEQ ID NO: 310), FC421487 (SEQ ID NO: 311), FC405689 (SEQ ID NO: 312), or BG275837 (SEQ ID NO: 313). In some cases, a functional homolog of SEQ ID NO: 165 has an amino acid sequence with at least 45% sequence identity, e.g., 50%, 52%, 56%, 59%, 61%, 65%, 70%, 75%, 80%, 85%, 90%, 95%, 97%, 98%, or 99% sequence identity, to the amino acid sequence set forth in SEQ ID NO: 165.

[0075] Examples of amino acid sequences of functional homologs of the polypeptide set forth in SEQ ID NO: 315 are provided in FIG. 4 and in the Sequence Listing. Such functional homologs include, for example, Ceres cDNA_ID: 1498985 (SEQ ID NO: 317), CeresAnnot:866611 (SEQ ID NO: 319), CeresAnnot:838033 (SEQ ID NO: 321), CeresClone:6399 (SEQ ID NO: 323), CeresAnnot:883525 (SEQ ID NO: 325), CeresAnnot:867752 (SEQ ID NO: 327), CeresAnnot:871059 (SEQ ID NO: 329), GI_NO_{—}12039257 (SEQ ID NO: 330), GI:157352568 (SEQ ID NO: 331), GI:74476783 (SEQ ID NO: 332), CeresAnnot:1486768 (SEQ ID NO: 334), GI:112383516 (SEQ ID NO: 335), GI:51587334 (SEQ ID NO: 336), CeresClone:535739 (SEQ ID NO: 338), CeresClone:1886265 (SEQ ID NO: 340), GI:115446631 (SEQ ID NO: 341), CeresAnnot:6119623 (SEQ ID NO: 343), CeresClone:1580417 (SEQ ID NO: 345), GI:146395463 (SEQ ID NO: 346), GI:152955872 (SEQ ID NO: 347), CeresClone:1883376 (SEQ ID NO: 349), CeresClone:1883376 (SEQ ID NO: 349), GI:21322510 (SEQ ID NO: 350), GI:4200165 (SEQ ID NO: 351), Ceres Peptide_ID:1010103 (SEQ ID NO: 352), Ceres Peptide_ID:1010104 (SEQ ID NO: 353), Ceres Peptide_ID:1498987 (SEQ ID NO: 354), Ceres Peptide_ID:1498988 (SEQ ID NO: 355), Ceres Peptide_ID:1809802 (SEQ ID NO: 356), GI:7267646 (SEQ ID NO: 357), CeresAnnot:1479723 (SEQ ID NO: 359), GI:42572857 (SEQ ID NO: 360), GI:18395144 (SEQ ID NO: 361), GI:21594008 (SEQ ID NO: 362), GI:15236209 (SEQ ID NO: 363), GI:157335158 (SEQ ID NO: 364), CeresAnnot:6086289 (SEQ ID NO: 366), GI:125539847 (SEQ ID NO: 367), CeresAnnot:1450491 (SEQ ID NO: 369), CeresAnnot:1460693 (SEQ ID NO: 371), CeresAnnot:1452868 (SEQ ID NO: 373), GI:115458460 (SEQ ID NO: 374), GI:115484433 (SEQ ID NO: 375), GI:125576397 (SEQ ID NO: 376), GI:125548352 (SEQ ID NO: 377), GI:79319205 (SEQ ID NO: 378), CeresAnnot:6007912 (SEQ ID NO: 380), CeresClone:1941767 (SEQ ID NO: 382), CeresAnnot:1444452 (SEQ ID NO: 384), GI:41053066 (SEQ ID NO: 385), GI:108864059 (SEQ ID NO: 386), GI:157327128 (SEQ ID NO: 387), GI:157343294 (SEQ ID NO: 388), GI:125580647 (SEQ ID NO: 389), GI:125537900 (SEQ ID NO: 390), GI:125555130 (SEQ ID NO: 391), GI:125555130 (SEQ ID NO: 391), CeresAnnot:1465440 (SEQ ID NO: 393), CeresAnnot:1488320 (SEQ ID NO: 395), CeresAnnot:1510995 (SEQ ID NO: 397), GI:45935151 (SEQ ID NO: 398), GI:157353979 (SEQ ID NO: 399), GI:125525725 (SEQ ID NO: 400), GI:115436346 (SEQ ID NO: 401), CeresAnnot:6096803 (SEQ ID NO: 403), CeresAnnot:1511927 (SEQ ID NO: 405), CeresAnnot:1458667 (SEQ ID NO: 407), GI:157346594 (SEQ ID NO: 408), CeresAnnot:6035762 (SEQ ID NO: 410), GI:115446465 (SEQ ID NO: 411), CeresAnnot:6018379 (SEQ ID NO: 413), GI:157353064 (SEQ ID NO: 414), GI:27948558 (SEQ ID NO: 415), GI:153850908 (SEQ ID NO: 416), GI:115452671 (SEQ ID NO: 417), GI:147773544 (SEQ ID NO: 418), GI:157347020 (SEQ ID NO: 419), GI:115458252 (SEQ ID NO: 420), GI:125548194 (SEQ ID NO: 421), GI:2832717 (SEQ ID NO: 422), GI:124270304 (SEQ ID NO: 423), GI:125539719 (SEQ ID NO: 424), CeresAnnot:1469136 (SEQ ID NO: 426), CeresAnnot:1522532 (SEQ ID NO: 428), GI:12322685 (SEQ ID NO: 429), GI:30794036 (SEQ ID NO: 430), GI:118562909 (SEQ ID NO: 431), GI:30679615 (SEQ ID NO: 432), GI:125590306 (SEQ ID NO: 433), GI:125543620 (SEQ ID NO: 434), GI:125586048 (SEQ ID NO: 435), (SEQ ID NO: 436), (SEQ ID NO: 437), (SEQ ID NO: 438), (SEQ ID NO: 439), (SEQ ID NO: 440), (SEQ ID NO: 441), (SEQ ID NO: 442), (SEQ ID NO: 443), (SEQ ID NO: 444), (SEQ ID NO: 445), (SEQ ID NO: 446), (SEQ ID NO: 447), (SEQ ID NO: 448), (SEQ ID NO: 449), CAP59642 (SEQ ID NO: 450), (SEQ ID NO: 451), (SEQ ID NO: 452), (SEQ ID NO: 453), (SEQ ID NO: 453), (SEQ ID NO: 454), (SEQ ID NO: 455), (SEQ ID NO: 456), (SEQ ID NO: 457), (SEQ ID NO: 458), EDQ57342 (SEQ ID NO: 459), EDQ52662 (SEQ ID NO: 460), (SEQ ID NO: 461), (SEQ ID NO: 462), (SEQ ID NO: 463), (SEQ ID NO: 464), (SEQ ID NO: 465), (SEQ ID NO: 466), (SEQ ID NO: 467), (SEQ ID NO: 468), (SEQ ID NO: 469), EDQ55594 (SEQ ID NO: 470), EDQ76746 (SEQ ID NO: 471), or (SEQ ID NO: 472). In some cases, a functional homolog of SEQ ID NO: 315 has an amino acid sequence with at least 45% sequence identity, e.g., 50%, 52%, 56%, 59%, 61%, 65%, 70%, 75%, 80%, 85%, 90%, 95%, 97%, 98%, or 99% sequence identity, to the amino acid sequence set forth in SEQ ID NO: 315.

[0076] Examples of amino acid sequences of functional homologs of the polypeptide set forth in SEQ ID NO: 474 are provided in FIG. 5 and in the Sequence Listing. Such functional homologs include, for example, Ceres Peptide_ID:4355121 (SEQ ID NO: 475), CeresClone:1284476 (SEQ ID NO: 477), Ceres P Clone:100746476 (SEQ ID NO: 479), CeresClone:1758903 (SEQ ID NO: 481), CeresClone:622426 (SEQ ID NO: 483), CeresClone:1770660 (SEQ ID NO: 485), CeresClone:1871189 (SEQ ID NO: 487), GI:32490260 (SEQ ID NO: 488), GI:49659792 (SEQ ID NO: 489), GI:115447281 (SEQ ID NO: 490), CeresClone:1835064 (SEQ ID NO: 492), CeresClone:18152 (SEQ ID NO: 494), CeresClone:1418421 (SEQ ID NO: 496), CeresClone:1416780 (SEQ ID NO: 498), CeresClone:1894775 (SEQ ID NO: 500), CeresClone:980427 (SEQ ID NO: 502), GI:70663924 (SEQ ID NO: 503), GI:125548935 (SEQ ID NO: 504), CeresClone:1730282 (SEQ ID NO: 506), CeresClone:528086 (SEQ ID NO: 508), CeresAnnot:8657405 (SEQ ID NO: 510), GI:115459286 (SEQ ID NO: 511), CeresAnnot:7923831 (SEQ ID NO: 513), CeresClone:1287015 (SEQ ID NO: 515),

CeresAnnot:1448104 (SEQ ID NO: 517), (SEQ ID NO: 518), or (SEQ ID NO: 519). In some cases, a functional homolog of SEQ ID NO: 474 has an amino acid sequence with at least 45% sequence identity, e.g., 50%, 52%, 56%, 59%, 61%, 65%, 70%, 75%, 80%, 85%, 90%, 95%, 97%, 98%, or 99% sequence identity, to the amino acid sequence set forth in SEQ ID NO: 474.

[0077] Examples of amino acid sequences of functional homologs of the polypeptide set forth in SEQ ID NO: 521 are provided in FIG. 6 and in the Sequence Listing. Such functional homologs include, for example, CeresClone:258841 (SEQ ID NO: 521), CeresAnnot:834509 (SEQ ID NO: 523), CeresAnnot:866384 (SEQ ID NO: 525), CeresAnnot:880496 (SEQ ID NO: 527), CeresAnnot:862435 (SEQ ID NO: 529), CeresClone:16533 (SEQ ID NO: 531), CeresClone:540068 (SEQ ID NO: 533), GI:2815305 (SEQ ID NO: 534), CeresClone:1973300 (SEQ ID NO: 536), CeresAnnot:1538994 (SEQ ID NO: 538), CeresClone:1611686 (SEQ ID NO: 540), GI:51870705 (SEQ ID NO: 541), CeresAnnot:6047730 (SEQ ID NO: 543), GI:122771 (SEQ ID NO: 544), GI:102140034 (SEQ ID NO: 545), GI:125536186 (SEQ ID NO: 546), (SEQ ID NO: 547), (SEQ ID NO: 548), (SEQ ID NO: 549), (SEQ ID NO: 550), (SEQ ID NO: 551), (SEQ ID NO: 552), (SEQ ID NO: 553), X83922 (SEQ ID NO: 554), SOYGBFB (SEQ ID NO: 555), CeresClone:1837464 (SEQ ID NO: 557), CeresClone:1884689 (SEQ ID NO: 559), GI:118488723 (SEQ ID NO: 560), CeresAnnot:1487864 (SEQ ID NO: 562), CeresAnnot:1541275 (SEQ ID NO: 564), CeresAnnot:1471259 (SEQ ID NO: 566), CeresAnnot:1444364 (SEQ ID NO: 568), GI:3608135 (SEQ ID NO: 569), GI:30690290 (SEQ ID NO: 570), GI:1399005 (SEQ ID NO: 571), GI:113367212 (SEQ ID NO: 572), GI:113367192 (SEQ ID NO: 573), GI:1354857 (SEQ ID NO: 574), GI:1155054 (SEQ ID NO: 575), GI:9650824 (SEQ ID NO: 576), GI:1169081 (SEQ ID NO: 577), GI:728628 (SEQ ID NO: 578), CeresAnnot:6007883 (SEQ ID NO: 580), CeresAnnot:6109033 (SEQ ID NO: 582), CeresClone:645403 (SEQ ID NO: 584), CeresClone:1221348 (SEQ ID NO: 586), GI:157335369 (SEQ ID NO: 587), GI:157348180 (SEQ ID NO: 588), or GI:147867254 (SEQ ID NO: 589). In some cases, a functional homolog of SEQ ID NO: 521 has an amino acid sequence with at least 45% sequence identity, e.g., 50%, 52%, 56%, 59%, 61%, 65%, 70%, 75%, 80%, 85%, 90%, 95%, 97%, 98%, or 99% sequence identity, to the amino acid sequence set forth in SEQ ID NO: 521.

[0078] Examples of amino acid sequences of functional homologs of the polypeptide set forth in SEQ ID NO: 591 are provided in FIG. 7 and in the Sequence Listing. Such functional homologs include CeresClone:1948444 (SEQ ID NO: 593), CeresAnnot:1541782 (SEQ ID NO: 595), GI:157352120 (SEQ ID NO: 596), CeresAnnot:8460479 (SEQ ID NO: 598), CeresClone:300029 (SEQ ID NO: 600), CeresClone:1788124 (SEQ ID NO: 602), GI:115442487 (SEQ ID NO: 603), CeresAnnot:6017305 (SEQ ID NO: 605), GI:147771536 (SEQ ID NO: 606), Ceres cDNA_ID:23374400 (SEQ ID NO: 608), Ceres cDNA_ID:23374400 (SEQ ID NO: 608), Ceres Peptide_ID:1009650 (SEQ ID NO: 609), Ceres Peptide_ID:2182905 (SEQ ID NO: 610), Ceres Peptide_ID:2182906 (SEQ ID NO: 611), GI:14596185 (SEQ ID NO: 612), GI:157346638 (SEQ ID NO: 613), CeresClone:1969770 (SEQ ID NO: 615), CeresClone:1995643 (SEQ ID NO: 617), CeresClone:1459647 (SEQ ID NO: 619), CeresClone:243057 (SEQ ID NO: 621), CeresClone:1936952 (SEQ ID NO: 623), GI:125529268 (SEQ ID NO: 624), CeresAnnot:7951750 (SEQ ID NO: 626), GI:85718018 (SEQ ID NO: 627), GI:162462229 (SEQ ID NO: 628), CeresAnnot:1460446 (SEQ ID NO: 630), GI:37379419 (SEQ ID NO: 631), CeresAnnot:1488364 (SEQ ID NO: 633), GI:45935133 (SEQ ID NO: 634), CeresClone:6892 (SEQ ID NO: 636), or CeresClone:1047104 (SEQ ID NO: 638). In some cases, a functional homolog of SEQ ID NO: 591 has an amino acid sequence with at least 45% sequence identity, e.g., 50%, 52%, 56%, 59%, 61%, 65%, 70%, 75%, 80%, 85%, 90%, 95%, 97%, 98%, or 99% sequence identity, to the amino acid sequence set forth in SEQ ID NO: 591.

[0079] The identification of conserved regions in a biomass-modulating polypeptide facilitates production of variants of biomass-modulating polypeptides. Variants of biomass-modulating polypeptides typically have 10 or fewer conservative amino acid substitutions within the primary amino acid sequence, e.g., 7 or fewer conservative amino acid substitutions, 5 or fewer conservative amino acid substitutions, or between 1 and 5 conservative substitutions. A useful variant polypeptide can be constructed based on one of the alignments set forth in FIG. 1, FIG. 2, FIG. 3, FIG. 4, FIG. 5, FIG. 6, or FIG. 7 and/or homologs identified in the Sequence Listing. Such a polypeptide includes the conserved regions, arranged in the order depicted in the Figure from amino-terminal end to carboxy-terminal end. Such a polypeptide may also include zero, one, or more than one amino acid in positions marked by dashes. When no amino acids are present at positions marked by dashes, the length of such a polypeptide is the sum of the amino acid residues in all conserved regions. When amino acids are present at a position marked by dashes, such a polypeptide has a length that is the sum of the amino acid residues in all conserved regions and all dashes.

[0080] C. Functional Homologs Identified by HMMER

[0081] In some embodiments, useful biomass-modulating polypeptides include those that fit a Hidden Markov Model based on the polypeptides set forth in any one of FIGS. 1-7. A Hidden Markov Model (HMM) is a statistical model of a consensus sequence for a group of functional homologs. See, Durbin et al., Biological Sequence Analysis: Probabilistic Models of Proteins and Nucleic Acids, Cambridge University Press, Cambridge, UK (1998). An HMM is generated by the program HMMER 2.3.2 with default program parameters, using the sequences of the group of functional homologs as input. The multiple sequence alignment is generated by ProbCons (Do et al., Genome Res., 15(2):330-40 (2005)) version 1.11 using a set of default parameters: -c, —consistency REPS of 2; -ir, —iterative-refinement REPS of 100; -pre, —pre-training REPS of 0. ProbCons is a public domain software program provided by Stanford University.

[0082] The default parameters for building an HMM (hmmbuild) are as follows: the default “architecture prior” (archpri) used by MAP architecture construction is 0.85, and the default cutoff threshold (idlevel) used to determine the effective sequence number is 0.62. HMMER 2.3.2 was released Oct. 3, 2003 under a GNU general public license, and is available from various sources on the World Wide Web such as hmmer.janelia.org; hmmer.wustl.edu; and fr.com/hmmer232/. Hmmbuild outputs the model as a text file.

[0083] The HMM for a group of functional homologs can be used to determine the likelihood that a candidate biomass-modulating polypeptide sequence is a better fit to that particular HMM than to a null HMM generated using a group of sequences that are not structurally or functionally related. The likelihood that a candidate polypeptide sequence is a better fit to an HMM than to a null HMM is indicated by the HMM bit score, a number generated when the candidate sequence is fitted to the HMM profile using the HMMER hmmsearch program. The following default parameters are used when running hmmsearch: the default E-value cutoff (E) is 10.0, the default bit score cutoff (T) is negative infinity, the default number of sequences in a database (Z) is the real number of sequences in the database, the default E-value cutoff for the per-domain ranked hit list (domE) is infinity, and the default bit score cutoff for the per-domain ranked hit list (domT) is negative infinity. A high HMM bit score indicates a greater likelihood that the candidate sequence carries out one or more of the biochemical or physiological function(s) of the polypeptides used to generate the HMM. A high HMM bit score is at least 20, and often is higher. Slight variations in the HMM bit score of a particular sequence can occur due to factors such as the order in which sequences are processed for alignment by multiple sequence alignment algorithms such as the ProbCons program. Nevertheless, such HMM bit score variation is minor.

[0084] The biomass-modulating polypeptides discussed below fit the indicated HMM with an HMM bit score greater than 210 (e.g., greater than 230, 240, 250, 260, 270, 280, 290, 2100, 2200, 2300, 2400, or 2500). In some embodiments, the HMM bit score of a biomass-modulating polypeptide discussed below is about 50%, 60%, 70%, 80%, 90%, or 95% of the HMM bit score of a functional homolog provided in the Sequence Listing of this application. In some embodiments, a biomass-modulating polypeptide discussed below fits the indicated HMM with an HMM bit score greater than 210, and has a domain indicative of an biomass-modulating polypeptide. In some embodiments, a biomass-modulating polypeptide discussed below fits the indicated HMM with an HMM bit score greater than 210, and has 65% or greater sequence identity (e.g., 75%, 80%, 85%, 90%, 95%, or 100% sequence identity) to an amino acid sequence shown in any one of FIGS. 1-7.

[0085] Examples of polypeptides are shown in the sequence listing that have HMM bit scores greater than 230 when fitted to an HMM generated from the amino acid sequences set forth in FIG. 1 are identified in the Sequence Listing of this application. Such polypeptides include, for example, 2, 4, 6, 8, 9, 11, 13, 14, 15, 16, 17, 19, 21, 22, 23, 25, 26, 28, 30, 32, 34, 36, 38, 39, 40, 41, 42, 43, 44, 45, 46, 48, 49, 50, 51, 52, 53, 54, 55, 56, 58, 60, 61, 62, 63, 64, 66, 68, 69, 70, 71, 72, 73, 74, 75, 76, 77, 78, 79, 80, 81, 82, 83, 84, 85, 86, 87, 88, 89, 90, 91, 92, 93, 94, 95, 96, 97, 98, 99, 100, 101, 102, 103, or 104.

[0086] Examples of polypeptides are shown in the sequence listing that have HMM bit scores greater than 350 when fitted to an HMM generated from the amino acid sequences set forth in FIG. 2 are identified in the Sequence Listing of this application. Such polypeptides include, for example, SEQ ID NOs: 106, 107, 109, 111, 112, 114, 115, 117, 119, 120, 122, 124, 126, 127, 129, 131, 133, 135, 137, 139, 140, 141, 142, 143, 144, 145, 146, 147, 148, 149, 150, 151, 152, 153, 154, 155, 156, 157, 158, 159, 160, 161, 162, or 163.

[0087] Examples of polypeptides are shown in the sequence listing that have HMM bit scores greater than 215 when fitted to an HMM generated from the amino acid sequences set forth in FIG. 3 are identified in the Sequence Listing of this application. Such polypeptides include, for example, SEQ ID NOs: 165, 166, 167, 169, 171, 173, 175, 176, 177, 179, 181, 183, 184, 185, 186, 188, 190, 192, 193, 195, 197, 198, 200, 202, 204, 206, 208, 210, 212, 214, 215, 217, 218, 219, 220, 222, 224, 226, 228, 230, 232, 234, 236, 238, 240, 241, 242, 243, 245, 247, 249, 251, 253, 254, 255, 256, 257, 258, 259, 260, 261, 262, 263, 264, 265, 267, 268, 269, 270, 271, 272, 273, 274, 275, 276, 277, 278, 279, 280, 281, 282, 283, 284, 285, 286, 287, 288, 289, 290, 291, 292, 293, 294, 295, 296, 297, 298, 299, 300, 301, 302, 303, 304, 305, 306, 307, 308, 309, 310, 311, 312, or 313.

[0088] Examples of polypeptides are shown in the sequence listing that have HMM bit scores greater than 880 when fitted to an HMM generated from the amino acid sequences set forth in FIG. 4 are identified in the Sequence Listing of this application. Such polypeptides include, for example, SEQ ID NOS: 315, 317, 319, 321, 323, 325, 327, 329, 330, 331, 332, 334, 335, 336, 338, 340, 341, 343, 345, 346, 347, 349, 350, 351, 352, 353, 354, 355, 356, 357, 359, 360, 361, 362, 363, 364, 366, 367, 369, 371, 373, 374, 375, 376, 377, 378, 380, 382, 384, 385, 386, 387, 388, 389, 390, 391, 393, 395, 397, 398, 399, 400, 401, 403, 405, 407, 408, 410, 411, 413, 414, 415, 416, 417, 418, 419, 420, 420, 421, 422, 423, 424, 426, 428, 429, 430, 430, 431, 432, 433, 434, 435, 436, 437, 438, 439, 440, 441, 442, 443, 444, 445, 446, 447, 448, 449, 450, 451, 452, 453, 454, 455, 456, 457, 458, 459, 460, 461, 462, 463, 464, 465, 466, 467, 468, 469, 470, 471, or 472.

[0089] Examples of polypeptides are shown in the sequence listing that have HMM bit scores greater than 240 when fitted to an HMM generated from the amino acid sequences set forth in FIG. 5 are identified in the Sequence Listing of this application. Such polypeptides include, for example, 474, 475, 477, 479, 481, 483, 485, 487, 488, 489, 490, 492, 494, 496, 498, 500, 502, 503, 504, 506, 508, 510, 511, 513, 515, 517, 518, or 519.

[0090] Examples of polypeptides are shown in the sequence listing that have HMM bit scores greater than 310 when fitted to an HMM generated from the amino acid sequences set forth in FIG. 6 are identified in the Sequence Listing of this application. Such polypeptides include, for example, 521, 523, 525, 527, 529, 531, 533, 534, 536, 538, 540, 541, 543, 544, 545, 546, 547, 548, 549, 550, 551, 552, 553, 554, 555, 557, 559, 560, 562, 564, 566, 568, 569, 570, 571, 572, 572, 573, 574, 575, 576, 577, 578, 580, 582, 584, 586, 587, 588, or 589.

[0091] Examples of polypeptides are shown in the sequence listing that have HMM bit scores greater than 810 when fitted to an HMM generated from the amino acid sequences set forth in FIG. 7 are identified in the Sequence Listing of this application. Such polypeptides include, for example, 591, 593, 595, 596, 598, 600, 602, 603, 605, 606, 608, 609, 610, 611, 612, 613, 615, 617, 619, 621, 623, 624, 626, 627, 628, 630, 631, 633, 634, 636, or 638.

[0092] D. Percent Identity

[0093] In some embodiments, a biomass-modulating polypeptide has an amino acid sequence with at least 45% sequence identity, e.g., 50%, 52%, 56%, 59%, 61%, 65%, 70%, 75%, 80%, 85%, 90%, 95%, 97%, 98%, or 99% sequence identity, to one of the amino acid sequences set forth in SEQ ID NOs: 2, 4, 6, 8, 9, 11, 13, 14, 15, 16, 17, 19, 21, 22, 23, 25, 26, 28, 30, 32, 34, 36, 38, 39, 40, 41, 42, 43, 44, 45, 46, 48, 49, 50, 51, 52, 53, 54, 55, 56, 58, 60, 61, 62, 63, 64, 66, 68, 69, 70, 71, 72, 73, 74, 75, 76, 77, 78, 79, 80, 81, 82, 83, 84, 85, 86, 87, 88, 89, 90, 91, 92, 93, 94, 95, 96, 97, 98, 99, 100, 101, 102, 103, 104, 106, 107, 109, 111, 112, 114, 115, 117, 119, 120, 122, 124, 126, 127, 129, 131, 133, 135, 137, 139, 140, 141, 142, 143, 144, 145, 146, 147, 148, 149, 150, 151, 152, 153, 154, 155, 156, 157, 158, 159, 160, 161, 162, 163, 165, 166, 167, 169, 171, 173, 175, 176, 177, 179, 181, 183, 184, 185, 186, 188, 190, 192, 193, 195, 197, 198, 200, 202, 204, 206, 208, 210, 212, 214, 215, 217, 218, 219, 220, 222, 224, 226, 228, 230, 232, 234, 236, 238, 240, 241, 242, 243, 245, 247, 249, 251, 253, 254, 255, 256, 257, 258, 259, 260, 261, 262, 263, 264, 265, 266, 267, 268, 269, 270, 271, 272, 273, 274, 275, 276, 277, 278, 279, 280, 281, 282, 283, 284, 285, 286, 287, 288, 289, 290, 291, 292, 293, 294, 295, 296, 297, 298, 299, 300, 301, 302, 303, 304, 305, 306, 307, 308, 309, 310, 311, 312, 313, 315, 317, 319, 321, 323, 325, 327, 329, 330, 331, 332, 334, 335, 336, 338, 340, 341, 343, 345, 346, 347, 349, 349, 350, 351, 352, 353, 354, 355, 356, 357, 359, 360, 361, 362, 363, 364, 366, 367, 369, 371, 373, 374, 374, 375, 376, 376, 377, 378, 380, 382, 384, 385, 386, 387, 388, 389, 390, 391, 391, 393, 395, 397, 398, 399, 400, 400, 401, 401, 403, 403, 405, 405, 407, 407, 408, 410, 411, 413, 414, 415, 416, 417, 418, 419, 420, 420, 421, 422, 423, 424, 426, 426, 428, 428, 429, 430, 430, 431, 432, 432, 433, 433, 434, 435, 436, 437, 438, 439, 440, 441, 442, 443, 444, 445, 446, 447, 448, 449, 450, 451, 452, 453, 454, 455, 456, 457, 458, 459, 460, 461, 462, 463, 464, 465, 466, 467, 468, 469, 470, 471, 472, 474, 475, 477, 479, 481, 483, 485, 487, 488, 489, 490, 492, 494, 496, 498, 500, 502, 503, 504, 506, 508, 510, 511, 513, 515, 517, 518, 519, 521, 523, 525, 527, 529, 531, 533, 534, 536, 538, 540, 541, 543, 544, 546, 547, 548, 549, 550, 551, 552, 553, 554, 555, 557, 559, 560, 562, 564, 566, 568, 569, 570, 571, 572, 573, 574, 575, 576, 577, 578, 580, 582, 584, 586, 587, 588, 589, 591, 593, 595, 596, 598, 600, 602, 603, 605, 606, 608, 608, 609, 610, 611, 612, 613, 615, 617, 619, 621, 623, 624, 626, 627, 628, 630, 631, 633, 634, 636, or 638. Polypeptides having such a percent sequence identity often have a domain indicative of a biomass-modulating polypeptide and/or have an HMM bit score that is greater than 210, as discussed above. Amino acid sequences of biomass-modulating polypeptides having at least 80% sequence identity to one of the amino acid sequences set forth in SEQ ID NOs: 2, 4, 6, 8, 9, 11, 13, 14, 15, 16, 17, 19, 21, 22, 23, 25, 26, 28, 30, 32, 34, 36, 38, 39, 40, 41, 42, 43, 44, 45, 46, 48, 49, 50, 51, 52, 53, 54, 55, 56, 58, 60, 61, 62, 63, 64, 66, 68, 69, 70, 71, 72, 73, 74, 75, 76, 77, 78, 79, 80, 81, 82, 83, 84, 85, 86, 87, 88, 89, 90, 91, 92, 93, 94, 95, 96, 97, 98, 99, 100, 101, 102, 103, 104, 106, 107, 109, 111, 112, 114, 115, 117, 119, 120, 122, 124, 126, 127, 129, 131, 133, 135, 137, 139, 140, 141, 142, 143, 144, 145, 146, 147, 148, 149, 150, 151, 152, 153, 154, 155, 156, 157, 158, 159, 160, 161, 162, 163, 165, 166, 167, 169, 171, 173, 175, 176, 177, 179, 181, 183, 184, 185, 186, 188, 190, 192, 193, 195, 197, 198, 200, 202, 204, 206, 208, 210, 212, 214, 215, 217, 218, 219, 220, 222, 224, 226, 228, 230, 232, 234, 236, 238, 240, 241, 242, 243, 245, 247, 249, 251, 253, 254, 255, 256, 257, 258, 259, 260, 261, 262, 263, 264, 265, 266, 267, 268, 269, 270, 271, 272, 273, 274, 275, 276, 277, 278, 279, 280, 281, 282, 283, 284, 285, 286, 287, 288, 289, 290, 291, 292, 293, 294, 295, 296, 297, 298, 299, 300, 301, 302, 303, 304, 305, 306, 307, 308, 309, 310, 311, 312, 313, 315, 317, 319, 321, 323, 325, 327, 329, 330, 331, 332, 334, 335, 336, 338, 340, 341, 343, 345, 346, 347, 349, 349, 350, 351, 352, 353, 354, 355, 356, 357, 359, 360, 361, 362, 363, 364, 366, 367, 369, 371, 373, 374, 374, 375, 376, 376, 377, 378, 380, 382, 384, 385, 386, 387, 388, 389, 390, 391, 391, 393, 395, 397, 398, 399, 400, 400, 401, 401, 403, 403, 405, 405, 407, 407, 408, 410, 411, 413, 414, 415, 416, 417, 418, 419, 420, 420, 421, 422, 423, 424, 426, 426, 428, 428, 429, 430, 430, 431, 432, 432, 433, 433, 434, 435, 436, 437, 438, 439, 440, 441, 442, 443, 444, 445, 446, 447, 448, 449, 450, 451, 452, 453, 454, 455, 456, 457, 458, 459, 460, 461, 462, 463, 464, 465, 466, 467, 468, 469, 470, 471, 472, 474, 475, 477, 479, 481, 483, 485, 487, 488, 489, 490, 492, 494, 496, 498, 500, 502, 503, 504, 506, 508, 510, 511, 513, 515, 517, 518, 519, 521, 523, 525, 527, 529, 531, 533, 534, 536, 538, 540, 541, 543, 544, 546, 547, 548, 549, 550, 551, 552, 553, 554, 555, 557, 559, 560, 562, 564, 566, 568, 569, 570, 571, 572, 573, 574, 575, 576, 577, 578, 580, 582, 584, 586, 587, 588, 589, 591, 593, 595, 596, 598, 600, 602, 603, 605, 606, 608, 608, 609, 610, 611, 612, 613, 615, 617, 619, 621, 623, 624, 626, 627, 628, 630, 631, 633, 634, 636, or 638 are provided in FIGS. 1-7 and in the Sequence Listing.

[0094] “Percent sequence identity” refers to the degree of sequence identity between any given reference sequence, e.g., SEQ ID NO: 2, and a candidate biomass-modulating sequence. A candidate sequence typically has a length that is from 80 percent to 200 percent of the length of the reference sequence, e.g., 82, 85, 87, 89, 90, 93, 95, 97, 99, 100, 105, 110, 115, 120, 130, 140, 150, 160, 170, 180, 190, or 200 percent of the length of the reference sequence. A percent identity for any candidate nucleic acid or polypeptide relative to a reference nucleic acid or polypeptide can be determined as follows. A reference sequence (e.g., a nucleic acid sequence or an amino acid sequence) is aligned to one or more candidate sequences using the computer program ClustalW (version 1.83, default parameters), which allows alignments of nucleic acid or polypeptide sequences to be carried out across their entire length (global alignment). Chema et al., Nucleic Acids Res., 31(13):3497-500 (2003).

[0095] ClustalW calculates the best match between a reference and one or more candidate sequences, and aligns them so that identities, similarities and differences can be determined. Gaps of one or more residues can be inserted into a reference sequence, a candidate sequence, or both, to maximize sequence alignments. For fast pairwise alignment of nucleic acid sequences, the following default parameters are used: word size: 2; window size: 4; scoring method: percentage; number of top diagonals: 4; and gap penalty: 5. For multiple alignment of nucleic acid sequences, the following parameters are used: gap opening penalty: 10.0; gap extension penalty: 5.0; and weight transitions: yes. For fast pairwise alignment of protein sequences, the following parameters are used: word size: 1; window size: 5; scoring method: percentage; number of top diagonals: 5; gap penalty: 3. For multiple alignment of protein sequences, the following parameters are used: weight matrix: blosum; gap opening penalty: 10.0; gap extension penalty: 0.05; hydrophilic gaps: on; hydrophilic residues: Gly, Pro, Ser, Asn, Asp, Gln, Glu, Arg, and Lys; residue-specific gap penalties: on. The ClustalW output is a sequence alignment that reflects the relationship between sequences. ClustalW can be run, for example, at the Baylor College of Medicine Search Launcher site (searchlauncher.bcm.tmc.edu/multi-align/multi-align.html) and at the European Bioinformatics Institute site on the World Wide Web (ebi.ac.uk/clustalw).

[0096] To determine percent identity of a candidate nucleic acid or amino acid sequence to a reference sequence, the sequences are aligned using ClustalW, the number of identical matches in the alignment is divided by the length of the reference sequence, and the result is multiplied by 100. It is noted that the percent identity value can be rounded to the nearest tenth. For example, 78.11, 78.12, 78.13, and 78.14 are rounded down to 78.1, while 78.15, 78.16, 78.17, 78.18, and 78.19 are rounded up to 78.2.

[0097] In some cases, a biomass-modulating polypeptide has an amino acid sequence with at least 45% sequence identity, e.g., 50%, 52%, 56%, 59%, 61%, 65%, 70%, 75%, 80%, 85%, 90%, 95%, 97%, 98%, or 99% sequence identity, to the amino acid sequence set forth in SEQ ID NO: 2, 4, 6, 8, 9, 11, 13, 14, 15, 16, 17, 19, 21, 22, 23, 25, 26, 28, 30, 32, 34, 36, 38, 39, 40, 41, 42, 43, 44, 45, 46, 48, 49, 50, 51, 52, 53, 54, 55, 56, 58, 60, 61, 62, 63, 64, 66, 68, 69, 70, 71, 72, 73, 74, 75, 76, 77, 78, 79, 80, 81, 82, 83, 84, 85, 86, 87, 88, 89, 90, 91, 92, 93, 94, 95, 96, 97, 98, 99, 100, 101, 102, 103, or 104. Amino acid sequences of polypeptides having greater than 45% sequence identity to the polypeptide set forth in SEQ ID NO: 2, 4, 6, 8, 9, 11, 13, 14, 15, 16, 17, 19, 21, 22, 23, 25, 26, 28, 30, 32, 34, 36, 38, 39, 40, 41, 42, 43, 44, 45, 46, 48, 49, 50, 51, 52, 53, 54, 55, 56, 58, 60, 61, 62, 63, 64, 66, 68, 69, 70, 71, 72, 73, 74, 75, 76, 77, 78, 79, 80, 81, 82, 83, 84, 85, 86, 87, 88, 89, 90, 91, 92, 93, 94, 95, 96, 97, 98, 99, 100, 101, 102, 103, or 104 are provided in FIG. 1 and in the Sequence Listing.

[0098] In some cases, a biomass-modulating polypeptide has an amino acid sequence with at least 45% sequence identity, e.g., 50%, 52%, 56%, 59%, 61%, 65%, 70%, 75%, 80%, 85%, 90%, 95%, 97%, 98%, or 99% sequence identity, to the amino acid sequence set forth in SEQ ID NO: 106, 107, 109, 111, 112, 114, 115, 117, 119, 120, 122, 124, 126, 127, 129, 131, 133, 135, 137, 139, 140, 141, 142, 143, 144, 145, 146, 147, 148, 149, 150, 151, 152, 153, 154, 155, 156, 157, 158, 159, 160, 161, 162, or 163. Amino acid sequences of polypeptides having greater than 45% sequence identity to the polypeptide set forth in SEQ ID NO: 106, 107, 109, 111, 112, 114, 115, 117, 119, 120, 122, 124, 126, 127, 129, 131, 133, 135, 137, 139, 140, 141, 142, 143, 144, 145, 146, 147, 148, 149, 150, 151, 152, 153, 154, 155, 156, 157, 158, 159, 160, 161, 162, or 163 are provided in FIG. 2 and in the Sequence Listing.

[0099] In some cases, a biomass-modulating polypeptide has an amino acid sequence with at least 45% sequence identity, e.g., 50%, 52%, 56%, 59%, 61%, 65%, 70%, 75%, 80%, 85%, 90%, 95%, 97%, 98%, or 99% sequence identity, to the amino acid sequence set forth in SEQ ID NO: 165, 166, 167, 169, 171, 173, 175, 176, 177, 179, 181, 183, 184, 185, 186, 188, 190, 192, 193, 195, 197, 198, 200, 202, 204, 206, 208, 210, 212, 214, 215, 217, 218, 219, 220, 222, 224, 226, 228, 230, 232, 234, 236, 238, 240, 241, 242, 243, 245, 247, 249, 251, 253, 254, 255, 256, 257, 258, 259, 260, 261, 262, 263, 264, 265, 267, 268, 269, 270, 271, 272, 273, 274, 275, 276, 277, 278, 279, 280, 281, 282, 283, 284, 285, 286, 287, 288, 289, 290, 291, 292, 293, 294, 295, 296, 297, 298, 299, 300, 301, 302, 303, 304, 305, 306, 307, 308, 309, 310, 311, 312, or 313. Amino acid sequences of polypeptides having greater than 45% sequence identity to the polypeptide set forth in SEQ ID NO: 165, 166, 167, 169, 171, 173, 175, 176, 177, 179, 181, 183, 184, 185, 186, 188, 190, 192, 193, 195, 197, 198, 200, 202, 204, 206, 208, 210, 212, 214, 215, 217, 218, 219, 220, 222, 224, 226, 228, 230, 232, 234, 236, 238, 240, 241, 242, 243, 245, 247, 249, 251, 253, 254, 255, 256, 257, 258, 259, 260, 261, 262, 263, 264, 265, 267, 268, 269, 270, 271, 272, 273, 274, 275, 276, 277, 278, 279, 280, 281, 282, 283, 284, 285, 286, 287, 288, 289, 290, 291, 292, 293, 294, 295, 296, 297, 298, 299, 300, 301, 302, 303, 304, 305, 306, 307, 308, 309, 310, 311, 312, or 313 are provided in FIG. 3 and in the Sequence Listing.

[0100] In some cases, a biomass-modulating polypeptide has an amino acid sequence with at least 45% sequence identity, e.g., 50%, 52%, 56%, 59%, 61%, 65%, 70%, 75%, 80%, 85%, 90%, 95%, 97%, 98%, or 99% sequence identity, to the amino acid sequence set forth in SEQ ID NO: 315, 317, 319, 321, 323, 325, 327, 329, 330, 331, 332, 334, 335, 336, 338, 340, 341, 343, 345, 346, 347, 349, 350, 351, 352, 353, 354, 355, 356, 357, 359, 360, 361, 362, 363, 364, 366, 367, 369, 371, 373, 374, 375, 376, 377, 378, 380, 382, 384, 385, 386, 387, 388, 389, 390, 391, 393, 395, 397, 398, 399, 400, 401, 403, 405, 407, 408, 410, 411, 413, 414, 415, 416, 417, 418, 419, 420, 420, 421, 422, 423, 424, 426, 428, 429, 430, 430, 431, 432, 433, 434, 435, 436, 437, 438, 439, 440, 441, 442, 443, 444, 445, 446, 447, 448, 449, 450, 451, 452, 453, 454, 455, 456, 457, 458, 459, 460, 461, 462, 463, 464, 465, 466, 467, 468, 469, 470, 471, or 472. Amino acid sequences of polypeptides having greater than 45% sequence identity to the polypeptide set forth in SEQ ID NO: 315, 317, 319, 321, 323, 325, 327, 329, 330, 331, 332, 334, 335, 336, 338, 340, 341, 343, 345, 346, 347, 349, 350, 351, 352, 353, 354, 355, 356, 357, 359, 360, 361, 362, 363, 364, 366, 367, 369, 371, 373, 374, 375, 376, 377, 378, 380, 382, 384, 385, 386, 387, 388, 389, 390, 391, 393, 395, 397, 398, 399, 400, 401, 403, 405, 407, 408, 410, 411, 413, 414, 415, 416, 417, 418, 419, 420, 420, 421, 422, 423, 424, 426, 428, 429, 430, 430, 431, 432, 433, 434, 435, 436, 437, 438, 439, 440, 441, 442, 443, 444, 445, 446, 447, 448, 449, 450, 451, 452, 453, 454, 455, 456, 457, 458, 459, 460, 461, 462, 463, 464, 465, 466, 467, 468, 469, 470, 471, or 472 are provided in FIG. 4 and in the Sequence Listing.

[0101] In some cases, a biomass-modulating polypeptide has an amino acid sequence with at least 45% sequence identity, e.g., 50%, 52%, 56%, 59%, 61%, 65%, 70%, 75%, 80%, 85%, 90%, 95%, 97%, 98%, or 99% sequence identity, to the amino acid sequence set forth in SEQ ID NO: 474, 475, 477, 479, 481, 483, 485, 487, 488, 489, 490, 492, 494, 496, 498, 500, 502, 503, 504, 506, 508, 510, 511, 513, 515, 517, 518, or 519. Amino acid sequences of polypeptides having greater than 45% sequence identity to the polypeptide set forth in SEQ ID NO: 474, 475, 477, 479, 481, 483, 485, 487, 488, 489, 490, 492, 494, 496, 498, 500, 502, 503, 504, 506, 508, 510, 511, 513, 515, 517, 518, or 519 are provided in FIG. 5 and in the Sequence Listing.

[0102] In some cases, a biomass-modulating polypeptide has an amino acid sequence with at least 45% sequence identity, e.g., 50%, 52%, 56%, 59%, 61%, 65%, 70%, 75%, 80%, 85%, 90%, 95%, 97%, 98%, or 99% sequence identity, to the amino acid sequence set forth in SEQ ID NO: 521, 523, 525, 527, 529, 531, 533, 534, 536, 538, 540, 541, 543, 544, 545, 546, 547, 548, 549, 550, 551, 552, 553, 554, 555, 557, 559, 560, 562, 564, 566, 568, 569, 570, 571, 572, 572, 573, 574, 575, 576, 577, 578, 580, 582, 584, 586, 587, 588, or 589. Amino acid sequences of polypeptides having greater than 45% sequence identity to the polypeptide set forth in SEQ ID NO: 521, 523, 525, 527, 529, 531, 533, 534, 536, 538, 540, 541, 543, 544, 545, 546, 547, 548, 549, 550, 551, 552, 553, 554, 555, 557, 559, 560, 562, 564, 566, 568, 569, 570, 571, 572, 572, 573, 574, 575, 576, 577, 578, 580, 582, 584, 586, 587, 588, or 589 are provided in FIG. 6 and in the Sequence Listing.

[0103] In some cases, a biomass-modulating polypeptide has an amino acid sequence with at least 45% sequence identity, e.g., 50%, 52%, 56%, 59%, 61%, 65%, 70%, 75%, 80%, 85%, 90%, 95%, 97%, 98%, or 99% sequence identity, to the amino acid sequence set forth in SEQ ID NO: 591, 593, 595, 596, 598, 600, 602, 603, 605, 606, 608, 609, 610, 611, 612, 613, 615, 617, 619, 621, 623, 624, 626, 627, 628, 630, 631, 633, 634, 636, or 638. Amino acid sequences of polypeptides having greater than 45% sequence identity to the polypeptide set forth in SEQ ID NO: 591, 593, 595, 596, 598, 600, 602, 603, 605, 606, 608, 609, 610, 611, 612, 613, 615, 617, 619, 621, 623, 624, 626, 627, 628, 630, 631, 633, 634, 636, or 638 are provided in FIG. 7 and in the Sequence Listing.

[0104] E. Other Sequences

[0105] It should be appreciated that a biomass-modulating polypeptide can include additional amino acids that are not involved in biomass modulation, and thus such a polypeptide can be longer than would otherwise be the case. For example, a biomass-modulating polypeptide can include a purification tag, a chloroplast transit peptide, a mitochondrial transit peptide, an amyloplast peptide, or a leader sequence added to the amino or carboxy terminus. In some embodiments, a biomass-modulating polypeptide includes an amino acid sequence that functions as a reporter, e.g., a green fluorescent protein or yellow fluorescent protein.

### III. NUCLEIC ACIDS

[0106] Nucleic acids described herein include nucleic acids that are effective to modulate biomass levels when transcribed in a plant or plant cell. Such nucleic acids include, without limitation, those that encode a biomass-modulating polypeptide and those that can be used to inhibit expression of a biomass-modulating polypeptide via a nucleic acid based method.

[0107] A. Nucleic Acids Encoding Biomass-Modulating Polypeptides

[0108] Nucleic acids encoding biomass-modulating polypeptides are described herein. Examples of such nucleic acids include SEQ ID NOs: 1, 105, 164, 314, 473, 520, or 590, as described in more detail below. A nucleic acid also can be a fragment that is at least 40% (e.g., at least 45, 50, 55, 60, 65, 70, 75, 80, 85, 90, 95, or 99%) of the length of the full-length nucleic acid set forth in SEQ ID NOs: 1, 3, 5, 7, 10, 12, 18, 20, 24, 27, 29, 31, 33, 35, 37, 47, 57, 59, 65, 67, 105, 108, 110, 113, 116, 118, 121, 123, 125, 128, 130, 132, 134, 136, 138, 164, 168, 170, 172, 174, 178, 180, 182, 187, 189, 191, 194, 196, 199, 201, 203, 205, 207, 209, 211, 213, 216, 221, 223, 225, 227, 229, 231, 233, 235, 237, 239, 244, 246, 248, 250, 252, 314, 316, 318, 320, 322, 324, 326, 328, 333, 337, 339, 342, 344, 348, 358, 365, 368, 370, 372, 379, 381, 383, 392, 394, 396, 402, 404, 406, 409, 412, 425, 427, 473, 476, 478, 480, 482, 484, 486, 491, 493, 495, 497, 499, 501, 505, 507, 509, 512, 514, 516, 520, 522, 524, 526, 528, 530, 532, 535, 537, 539, 542, 556, 558, 561, 563, 565, 567, 579, 581, 583, 585, 590, 592, 594, 597, 599, 601, 604, 607, 614, 616, 618, 620, 622, 625, 629, 632, 635, or 637.

[0109] A biomass-modulating nucleic acid can comprise the nucleotide sequence set forth in SEQ ID NO: 1. Alternatively, a biomass-modulating nucleic acid can be a variant of the nucleic acid having the nucleotide sequence set forth in SEQ ID NO: 1. For example, a biomass-modulating nucleic acid can have a nucleotide sequence with at least 80% sequence identity, e.g., 81%, 85%, 90%, 95%, 97%, 98%, or 99% sequence identity, to the nucleotide sequence set forth in SEQ ID NO: 1, 3, 5, 7, 10, 12, 18, 20, 24, 27, 29, 31, 33, 35, 37, 47, 57, 59, 65, or 67.

[0110] A biomass-modulating nucleic acid can comprise the nucleotide sequence set forth in SEQ ID NO: 105. Alternatively, a biomass-modulating nucleic acid can be a variant of the nucleic acid having the nucleotide sequence set forth in SEQ ID NO: 105. For example, a biomass-modulating nucleic acid can have a nucleotide sequence with at least 80% sequence identity, e.g., 81%, 85%, 90%, 95%, 97%, 98%, or 99% sequence identity, to the nucleotide sequence set forth in SEQ ID NO: 105, 108, 110, 113, 116, 118, 121, 123, 125, 128, 130, 132, 134, 136, or 138.

[0111] A biomass-modulating nucleic acid can comprise the nucleotide sequence set forth in SEQ ID NO: 164. Alternatively, a biomass-modulating nucleic acid can be a variant of the nucleic acid having the nucleotide sequence set forth in SEQ ID NO: 164. For example, a biomass-modulating nucleic acid can have a nucleotide sequence with at least 80% sequence identity, e.g., 81%, 85%, 90%, 95%, 97%, 98%, or 99% sequence identity, to the nucleotide sequence set forth in SEQ ID NO: 164, 168, 170, 172, 174, 178, 180, 182, 187, 189, 191, 194, 196, 199, 201, 203, 205, 207, 209, 211, 213, 216, 221, 223, 225, 227, 229, 231, 233, 235, 237, 239, 244, 246, 248, 250, or 252.

[0112] A biomass-modulating nucleic acid can comprise the nucleotide sequence set forth in SEQ ID NO: 314. Alternatively, a biomass-modulating nucleic acid can be a variant of the nucleic acid having the nucleotide sequence set forth in SEQ ID NO: 314. For example, a biomass-modulating nucleic acid can have a nucleotide sequence with at least 80% sequence identity, e.g., 81%, 85%, 90%, 95%, 97%, 98%, or 99% sequence identity, to the nucleotide sequence set forth in SEQ ID NO: 314, 316, 318, 320, 322, 324, 326, 328, 333, 337, 339, 342, 344, 348, 358, 365, 368, 370, 372, 379, 381, 383, 392, 394, 396, 402, 404, 406, 409, 412, 425, or 427.

[0113] A biomass-modulating nucleic acid can comprise the nucleotide sequence set forth in SEQ ID NO: 473. Alternatively, a biomass-modulating nucleic acid can be a variant of the nucleic acid having the nucleotide sequence set forth in SEQ ID NO: 473. For example, a biomass-modulating nucleic acid can have a nucleotide sequence with at least 80% sequence identity, e.g., 81%, 85%, 90%, 95%, 97%, 98%, or 99% sequence identity, to the nucleotide sequence set forth in SEQ ID NO: 473, 476, 478, 480, 482, 484, 486, 491, 493, 495, 497, 499, 501, 505, 507, 509, 512, 514, or 516.

[0114] A biomass-modulating nucleic acid can comprise the nucleotide sequence set forth in SEQ ID NO: 520. Alternatively, a biomass-modulating nucleic acid can be a variant of the nucleic acid having the nucleotide sequence set forth in SEQ ID NO: 520. For example, a biomass-modulating nucleic acid can have a nucleotide sequence with at least 80% sequence identity, e.g., 81%, 85%, 90%, 95%, 97%, 98%, or 99% sequence identity, to the nucleotide sequence set forth in SEQ ID NO: 520, 522, 524, 526, 528, 530, 532, 535, 537, 539, 542, 556, 558, 561, 563, 565, 567, 579, 581, 583, or 585.

[0115] A biomass-modulating nucleic acid can comprise the nucleotide sequence set forth in SEQ ID NO: 590. Alternatively, a biomass-modulating nucleic acid can be a variant of the nucleic acid having the nucleotide sequence set forth in SEQ ID NO: 590. For example, a biomass-modulating nucleic acid can have a nucleotide sequence with at least 80% sequence identity, e.g., 81%, 85%, 90%, 95%, 97%, 98%, or 99% sequence identity, to the nucleotide sequence set forth in SEQ ID NO: 590, 592, 594, 597, 599, 601, 604, 607, 614, 616, 618, 620, 622, 625, 629, 632, 635, or 637.

[0116] Isolated nucleic acid molecules can be produced by standard techniques. For example, polymerase chain reaction (PCR) techniques can be used to obtain an isolated nucleic acid containing a nucleotide sequence described herein. PCR can be used to amplify specific sequences from DNA as well as RNA, including sequences from total genomic DNA or total cellular RNA. Various PCR methods are described, for example, in PCR Primer: A Laboratory Manual, Dieffenbach and Dveksler, eds., Cold Spring Harbor Laboratory Press, 1995. Generally, sequence information from the ends of the region of interest or beyond is employed to design oligonucleotide primers that are identical or similar in sequence to opposite strands of the template to be amplified. Various PCR strategies also are available by which site-specific nucleotide sequence modifications can be introduced into a template nucleic acid. Isolated nucleic acids also can be chemically synthesized, either as a single nucleic acid molecule (e.g., using automated DNA synthesis in the 3′ to 5′ direction using phosphoramidite technology) or as a series of oligonucleotides. For example, one or more pairs of long oligonucleotides (e.g., >100 nucleotides) can be synthesized that contain the desired sequence, with each pair containing a short segment of complementarity (e.g., about 15 nucleotides) such that a duplex is formed when the oligonucleotide pair is annealed. DNA polymerase is used to extend the oligonucleotides, resulting in a single, double-stranded nucleic acid molecule per oligonucleotide pair, which then can be ligated into a vector. Isolated nucleic acids of the invention also can be obtained by mutagenesis of, e.g., a naturally occurring DNA.

[0117] B. Use of Nucleic Acids to Modulate Expression of Polypeptides

[0118] i. Expression of a Biomass-Modulating Polypeptide

[0119] A nucleic acid encoding one of the biomass-modulating polypeptides described herein can be used to express the polypeptide in a plant species of interest, typically by transforming a plant cell with a nucleic acid having the coding sequence for the polypeptide operably linked in sense orientation to one or more regulatory regions. It will be appreciated that because of the degeneracy of the genetic code, a number of nucleic acids can encode a particular biomass-modulating polypeptide; i.e., for many amino acids, there is more than one nucleotide triplet that serves as the codon for the amino acid. Thus, codons in the coding sequence for a given biomass-modulating polypeptide can be modified such that optimal expression in a particular plant species is obtained, using appropriate codon bias tables for that species.

[0120] In some cases, expression of a biomass-modulating polypeptide inhibits one or more functions of an endogenous polypeptide. For example, a nucleic acid that encodes a dominant negative polypeptide can be used to inhibit protein function. A dominant negative polypeptide typically is mutated or truncated relative to an endogenous wild type polypeptide, and its presence in a cell inhibits one or more functions of the wild type polypeptide in that cell, i.e., the dominant negative polypeptide is genetically dominant and confers a loss of function. The mechanism by which a dominant negative polypeptide confers such a phenotype can vary but often involves a protein-protein interaction or a protein-DNA interaction. For example, a dominant negative polypeptide can be an enzyme that is truncated relative to a native wild type enzyme, such that the truncated polypeptide retains domains involved in binding a first protein but lacks domains involved in binding a second protein. The truncated polypeptide is thus unable to properly modulate the activity of the second protein. See, e.g., US 2007/0056058. As another example, a point mutation that results in a non-conservative amino acid substitution in a catalytic domain can result in a dominant negative polypeptide. See, e.g., US 2005/032221. As another example, a dominant negative polypeptide can be a transcription factor that is truncated relative to a native wild type transcription factor, such that the truncated polypeptide retains the DNA binding domain(s) but lacks the activation domain(s). Such a truncated polypeptide can inhibit the wild type transcription factor from binding DNA, thereby inhibiting transcription activation.

[0121] ii. Inhibition of Expression of a Biomass-Modulating Polypeptide

[0122] Polynucleotides and recombinant constructs described herein can be used to inhibit expression of a biomass-modulating polypeptide in a plant species of interest. See, e.g., Matzke and Birchler, Nature Reviews Genetics 6:24-35 (2005); Akashi et al., Nature Reviews Mol. Cell. Biology 6:413-422 (2005); Mittal, Nature Reviews Genetics 5:355-365 (2004); and Nature Reviews RNA interference collection, October 2005 at nature.com/reviews/focus/mai. A number of nucleic acid based methods, including antisense RNA, ribozyme directed RNA cleavage, post-transcriptional gene silencing (PTGS), e.g., RNA interference (RNAi), and transcriptional gene silencing (TGS) are known to inhibit gene expression in plants. Suitable polynucleotides include full-length nucleic acids encoding biomass-modulating polypeptides or fragments of such full-length nucleic acids. In some embodiments, a complement of the full-length nucleic acid or a fragment thereof can be used. Typically, a fragment is at least 10 nucleotides, e.g., at least 12, 13, 14, 15, 16, 17, 18, 19, 20, 21, 22, 23, 24, 25, 26, 27, 30, 35, 40, 50, 80, 100, 200, 500 nucleotides or more. Generally, higher homology can be used to compensate for the use of a shorter sequence.

[0123] Antisense technology is one well-known method. In this method, a nucleic acid of a gene to be repressed is cloned and operably linked to a regulatory region and a transcription termination sequence so that the antisense strand of RNA is transcribed. The recombinant construct is then transformed into plants, as described herein, and the antisense strand of RNA is produced. The nucleic acid need not be the entire sequence of the gene to be repressed, but typically will be substantially complementary to at least a portion of the sense strand of the gene to be repressed.

[0124] In another method, a nucleic acid can be transcribed into a ribozyme, or catalytic RNA, that affects expression of an mRNA. See, U.S. Pat. No. 6,423,885. Ribozymes can be designed to specifically pair with virtually any target RNA and cleave the phosphodiester backbone at a specific location, thereby functionally inactivating the target RNA. Heterologous nucleic acids can encode ribozymes designed to cleave particular mRNA transcripts, thus preventing expression of a polypeptide. Hammerhead ribozymes are useful for destroying particular mRNAs, although various ribozymes that cleave mRNA at site-specific recognition sequences can be used. Hammerhead ribozymes cleave mRNAs at locations dictated by flanking regions that form complementary base pairs with the target mRNA. The sole requirement is that the target RNA contains a 5′-UG-3′ nucleotide sequence. The construction and production of hammerhead ribozymes is known in the art. See, for example, U.S. Pat. No. 5,254,678 and WO 02/46449 and references cited therein. Hammerhead ribozyme sequences can be embedded in a stable RNA such as a transfer RNA (tRNA) to increase cleavage efficiency in vivo. Perriman et al., Proc. Natl. Acad. Sci. USA, 92(13):6175-6179 (1995); de Feyter and Gaudron, Methods in Molecular Biology, Vol. 74, Chapter 43, “Expressing Ribozymes in Plants”, Edited by Turner, P. C., Humana Press Inc., Totowa, N.J. RNA endoribonucleases which have been described, such as the one that occurs naturally in Tetrahymena thermophile, can be useful. See, for example, U.S. Pat. Nos. 4,987,071 and 6,423,885.

[0125] PTGS, e.g., RNAi, can also be used to inhibit the expression of a gene. For example, a construct can be prepared that includes a sequence that is transcribed into an RNA that can anneal to itself, e.g., a double stranded RNA having a stem-loop structure. In some embodiments, one strand of the stem portion of a double stranded RNA comprises a sequence that is similar or identical to the sense coding sequence or a fragment thereof of a biomass-modulating polypeptide, and that is from about 10 nucleotides to about 2,500 nucleotides in length. The length of the sequence that is similar or identical to the sense coding sequence can be from 10 nucleotides to 500 nucleotides, from 15 nucleotides to 300 nucleotides, from 20 nucleotides to 100 nucleotides, or from 25 nucleotides to 100 nucleotides. The other strand of the stem portion of a double stranded RNA comprises a sequence that is similar or identical to the antisense strand or a fragment thereof of the coding sequence of the biomass-modulating polypeptide, and can have a length that is shorter, the same as, or longer than the corresponding length of the sense sequence. In some cases, one strand of the stem portion of a double stranded RNA comprises a sequence that is similar or identical to the 3′ or 5′ untranslated region, or a fragment thereof, of an mRNA encoding a biomass-modulating polypeptide, and the other strand of the stem portion of the double stranded RNA comprises a sequence that is similar or identical to the sequence that is complementary to the 3′ or 5′ untranslated region, respectively, or a fragment thereof, of the mRNA encoding the biomass-modulating polypeptide. In other embodiments, one strand of the stem portion of a double stranded RNA comprises a sequence that is similar or identical to the sequence of an intron, or a fragment thereof, in the pre-mRNA encoding a biomass-modulating polypeptide, and the other strand of the stem portion comprises a sequence that is similar or identical to the sequence that is complementary to the sequence of the intron, or a fragment thereof, in the pre-mRNA.

[0126] The loop portion of a double stranded RNA can be from 3 nucleotides to 5,000 nucleotides, e.g., from 3 nucleotides to 25 nucleotides, from 15 nucleotides to 1,000 nucleotides, from 20 nucleotides to 500 nucleotides, or from 25 nucleotides to 200 nucleotides. The loop portion of the RNA can include an intron or a fragment thereof. A double stranded RNA can have zero, one, two, three, four, five, six, seven, eight, nine, ten, or more stem-loop structures.

[0127] A construct including a sequence that is operably linked to a regulatory region and a transcription termination sequence, and that is transcribed into an RNA that can form a double stranded RNA, is transformed into plants as described herein. Methods for using RNAi to inhibit the expression of a gene are known to those of skill in the art. See, e.g., U.S. Pat. Nos. 5,034,323; 6,326,527; 6,452,067; 6,573,099; 6,753,139; and 6,777,588. See also WO 97/01952; WO 98/53083; WO 99/32619; WO 98/36083; and U.S. Patent Publications 20030175965, 20030175783, 20040214330, and 20030180945.

[0128] Constructs containing regulatory regions operably linked to nucleic acid molecules in sense orientation can also be used to inhibit the expression of a gene. The transcription product can be similar or identical to the sense coding sequence, or a fragment thereof, of a biomass-modulating polypeptide. The transcription product also can be unpolyadenylated, lack a 5′ cap structure, or contain an unspliceable intron. Methods of inhibiting gene expression using a full-length cDNA as well as a partial cDNA sequence are known in the art. See, e.g., U.S. Pat. No. 5,231,020.

[0129] In some embodiments, a construct containing a nucleic acid having at least one strand that is a template for both sense and antisense sequences that are complementary to each other is used to inhibit the expression of a gene. The sense and antisense sequences can be part of a larger nucleic acid molecule or can be part of separate nucleic acid molecules having sequences that are not complementary. The sense or antisense sequence can be a sequence that is identical or complementary to the sequence of an mRNA, the 3′ or 5′ untranslated region of an mRNA, or an intron in a pre-mRNA encoding a biomass-modulating polypeptide, or a fragment of such sequences. In some embodiments, the sense or antisense sequence is identical or complementary to a sequence of the regulatory region that drives transcription of the gene encoding a biomass-modulating polypeptide. In each case, the sense sequence is the sequence that is complementary to the antisense sequence.

[0130] The sense and antisense sequences can be a length greater than about 10 nucleotides (e.g., 12, 13, 14, 15, 16, 17, 18, 19, 20, 21, 22, 23, 24, 25, 26, 27, 28, 29, 30, or more nucleotides). For example, an antisense sequence can be 21 or 22 nucleotides in length. Typically, the sense and antisense sequences range in length from about 15 nucleotides to about 30 nucleotides, e.g., from about 18 nucleotides to about 28 nucleotides, or from about 21 nucleotides to about 25 nucleotides.

[0131] In some embodiments, an antisense sequence is a sequence complementary to an mRNA sequence, or a fragment thereof, encoding a biomass-modulating polypeptide described herein. The sense sequence complementary to the antisense sequence can be a sequence present within the mRNA of the biomass-modulating polypeptide. Typically, sense and antisense sequences are designed to correspond to a 15-30 nucleotide sequence of a target mRNA such that the level of that target mRNA is reduced.

[0132] In some embodiments, a construct containing a nucleic acid having at least one strand that is a template for more than one sense sequence (e.g., 2, 3, 4, 5, 6, 7, 8, 9, 10 or more sense sequences) can be used to inhibit the expression of a gene. Likewise, a construct containing a nucleic acid having at least one strand that is a template for more than one antisense sequence (e.g., 2, 3, 4, 5, 6, 7, 8, 9, 10 or more antisense sequences) can be used to inhibit the expression of a gene. For example, a construct can contain a nucleic acid having at least one strand that is a template for two sense sequences and two antisense sequences. The multiple sense sequences can be identical or different, and the multiple antisense sequences can be identical or different. For example, a construct can have a nucleic acid having one strand that is a template for two identical sense sequences and two identical antisense sequences that are complementary to the two identical sense sequences. Alternatively, an isolated nucleic acid can have one strand that is a template for (1) two identical sense sequences 20 nucleotides in length, (2) one antisense sequence that is complementary to the two identical sense sequences 20 nucleotides in length, (3) a sense sequence 30 nucleotides in length, and (4) three identical antisense sequences that are complementary to the sense sequence 30 nucleotides in length. The constructs provided herein can be designed to have a suitable arrangement of sense and antisense sequences. For example, two identical sense sequences can be followed by two identical antisense sequences or can be positioned between two identical antisense sequences.

[0133] A nucleic acid having at least one strand that is a template for one or more sense and/or antisense sequences can be operably linked to a regulatory region to drive transcription of an RNA molecule containing the sense and/or antisense sequence(s). In addition, such a nucleic acid can be operably linked to a transcription terminator sequence, such as the terminator of the nopaline synthase (nos) gene. In some cases, two regulatory regions can direct transcription of two transcripts: one from the top strand, and one from the bottom strand. See, for example, Yan et al., Plant Physiol., 141:1508-1518 (2006). The two regulatory regions can be the same or different. The two transcripts can form double-stranded RNA molecules that induce degradation of the target RNA. In some cases, a nucleic acid can be positioned within a T-DNA or plant-derived transfer DNA (P-DNA) such that the left and right T-DNA border sequences, or the left and right border-like sequences of the P-DNA, flank or are on either side of the nucleic acid. See, US 2006/0265788. The nucleic acid sequence between the two regulatory regions can be from about 15 to about 300 nucleotides in length. In some embodiments, the nucleic acid sequence between the two regulatory regions is from about 15 to about 200 nucleotides in length, from about 15 to about 100 nucleotides in length, from about 15 to about 50 nucleotides in length, from about 18 to about 50 nucleotides in length, from about 18 to about 40 nucleotides in length, from about 18 to about 30 nucleotides in length, or from about 18 to about 25 nucleotides in length.

[0134] In some nucleic-acid based methods for inhibition of gene expression in plants, a suitable nucleic acid can be a nucleic acid analog. Nucleic acid analogs can be modified at the base moiety, sugar moiety, or phosphate backbone to improve, for example, stability, hybridization, or solubility of the nucleic acid. Modifications at the base moiety include deoxyuridine for deoxythymidine, and 5-methyl-2′-deoxycytidine and 5-bromo-2′-deoxycytidine for deoxycytidine. Modifications of the sugar moiety include modification of the 2′ hydroxyl of the ribose sugar to form 2′-O-methyl or 2′-O-allyl sugars. The deoxyribose phosphate backbone can be modified to produce morpholino nucleic acids, in which each base moiety is linked to a six-membered morpholino ring, or peptide nucleic acids, in which the deoxyphosphate backbone is replaced by a pseudopeptide backbone and the four bases are retained. See, for example, Summerton and Weller, 1997, Antisense Nucleic Acid Drug Dev., 7:187-195; Hyrup et al., Bioorgan. Med. Chem., 4:5-23 (1996). In addition, the deoxyphosphate backbone can be replaced with, for example, a phosphorothioate or phosphorodithioate backbone, a phosphoroamidite, or an alkyl phosphotriester backbone.

[0135] C. Constructs/Vectors

[0136] Recombinant constructs provided herein can be used to transform plants or plant cells in order to modulate biomass levels. A recombinant nucleic acid construct can comprise a nucleic acid encoding a biomass-modulating polypeptide as described herein, operably linked to a regulatory region suitable for expressing the biomass-modulating polypeptide in the plant or cell. Thus, a nucleic acid can comprise a coding sequence that encodes a biomass-modulating polypeptides as set forth in SEQ ID NOs: 2, 4, 6, 8, 9, 11, 13, 14, 15, 16, 17, 19, 21, 22, 23, 25, 26, 28, 30, 32, 34, 36, 38, 39, 40, 41, 42, 43, 44, 45, 46, 48, 49, 50, 51, 52, 53, 54, 55, 56, 58, 60, 61, 62, 63, 64, 66, 68, 69, 70, 71, 72, 73, 74, 75, 76, 77, 78, 79, 80, 81, 82, 83, 84, 85, 86, 87, 88, 89, 90, 91, 92, 93, 94, 95, 96, 97, 98, 99, 100, 101, 102, 103, 104, 106, 107, 109, 111, 112, 114, 115, 117, 119, 120, 122, 124, 126, 127, 129, 131, 133, 135, 137, 139, 140, 141, 142, 143, 144, 145, 146, 147, 148, 149, 150, 151, 152, 153, 154, 155, 156, 157, 158, 159, 160, 161, 162, 163, 165, 166, 167, 169, 171, 173, 175, 176, 177, 179, 181, 183, 184, 185, 186, 188, 190, 192, 193, 195, 197, 198, 200, 202, 204, 206, 208, 210, 212, 214, 215, 217, 218, 219, 220, 222, 224, 226, 228, 230, 232, 234, 236, 238, 240, 241, 242, 243, 245, 247, 249, 251, 253, 254, 255, 256, 257, 258, 259, 260, 261, 262, 263, 264, 265, 266, 267, 268, 269, 270, 271, 272, 273, 274, 275, 276, 277, 278, 279, 280, 281, 282, 283, 284, 285, 286, 287, 288, 289, 290, 291, 292, 293, 294, 295, 296, 297, 298, 299, 300, 301, 302, 303, 304, 305, 306, 307, 308, 309, 310, 311, 312, 313, 315, 317, 319, 321, 323, 325, 327, 329, 330, 331, 332, 334, 335, 336, 338, 340, 341, 343, 345, 346, 347, 349, 349, 350, 351, 352, 353, 354, 355, 356, 357, 359, 360, 361, 362, 363, 364, 366, 367, 369, 371, 373, 374, 374, 375, 376, 376, 377, 378, 380, 382, 384, 385, 386, 387, 388, 389, 390, 391, 391, 393, 395, 397, 398, 399, 400, 400, 401, 401, 403, 403, 405, 405, 407, 407, 408, 410, 411, 413, 414, 415, 416, 417, 418, 419, 420, 420, 421, 422, 423, 424, 426, 426, 428, 428, 429, 430, 430, 431, 432, 432, 433, 433, 434, 435, 436, 437, 438, 439, 440, 441, 442, 443, 444, 445, 446, 447, 448, 449, 450, 451, 452, 453, 453, 454, 455, 456, 457, 458, 459, 460, 461, 462, 463, 464, 465, 466, 467, 468, 469, 470, 471, 472, 474, 475, 477, 479, 481, 483, 485, 487, 488, 489, 490, 492, 494, 496, 498, 500, 502, 503, 504, 506, 508, 510, 511, 513, 515, 517, 518, 519, 521, 523, 525, 527, 529, 531, 533, 534, 536, 538, 540, 541, 543, 544, 546, 547, 548, 549, 550, 551, 552, 553, 554, 555, 557, 559, 560, 562, 564, 566, 568, 569, 570, 571, 572, 573, 574, 575, 576, 577, 578, 580, 582, 584, 586, 587, 588, 589, 591, 593, 595, 596, 598, 600, 602, 603, 605, 606, 608, 608, 609, 610, 611, 612, 613, 615, 617, 619, 621, 623, 624, 626, 627, 628, 630, 631, 633, 634, 636, or 638. Examples of nucleic acids encoding biomass-modulating polypeptides are set forth in SEQ ID NO: 3, 5, 7, 10, 12, 18, 20, 24, 27, 29, 31, 33, 35, 37, 47, 57, 59, 65, 67, 105, 108, 110, 113, 116, 118, 121, 123, 125, 128, 130, 132, 134, 136, 138, 164, 168, 170, 172, 174, 178, 180, 182, 187, 189, 191, 194, 196, 199, 201, 203, 205, 207, 209, 211, 213, 216, 221, 223, 225, 227, 229, 231, 233, 235, 237, 239, 244, 246, 248, 250, 252, 314, 316, 318, 320, 322, 324, 326, 328, 333, 337, 339, 342, 344, 348, 358, 365, 368, 370, 372, 379, 381, 383, 392, 394, 396, 402, 404, 406, 409, 412, 425, 427, 473, 476, 478, 480, 482, 484, 486, 491, 493, 495, 497, 499, 501, 505, 507, 509, 512, 514, 516, 520, 522, 524, 526, 528, 530, 532, 535, 537, 539, 542, 556, 558, 561, 563, 565, 567, 579, 581, 583, 585, 590, 592, 594, 597, 599, 601, 604, 607, 614, 616, 618, 620, 622, 625, 629, 632, 635, or 637. The biomass-modulating polypeptide encoded by a recombinant nucleic acid can be a native biomass-modulating polypeptide, or can be heterologous to the cell. In some cases, the recombinant construct contains a nucleic acid that inhibits expression of a biomass-modulating polypeptide, operably linked to a regulatory region. Examples of suitable regulatory regions are described in the section entitled “Regulatory Regions.”

[0137] Vectors containing recombinant nucleic acid constructs such as those described herein also are provided. Suitable vector backbones include, for example, those routinely used in the art such as plasmids, viruses, artificial chromosomes, BACs, YACs, or PACs. Suitable expression vectors include, without limitation, plasmids and viral vectors derived from, for example, bacteriophage, baculoviruses, and retroviruses. Numerous vectors and expression systems are commercially available from such corporations as Novagen (Madison, Wis.), Clontech (Palo Alto, Calif.), Stratagene (La Jolla, Calif.), and Invitrogen/Life Technologies (Carlsbad, Calif.).

[0138] The vectors provided herein also can include, for example, origins of replication, scaffold attachment regions (SARs), and/or markers. A marker gene can confer a selectable phenotype on a plant cell. For example, a marker can confer biocide resistance, such as resistance to an antibiotic (e.g., kanamycin, G418, bleomycin, or hygromycin), or an herbicide (e.g., glyphosate, chlorsulfuron or phosphinothricin). In addition, an expression vector can include a tag sequence designed to facilitate manipulation or detection (e.g., purification or localization) of the expressed polypeptide. Tag sequences, such as luciferase, β-glucuronidase (GUS), green fluorescent protein (GFP), glutathione S-transferase (GST), polyhistidine, c-myc, hemagglutinin, or Flag™ tag (Kodak, New Haven, Conn.) sequences typically are expressed as a fusion with the encoded polypeptide. Such tags can be inserted anywhere within the polypeptide, including at either the carboxyl or amino terminus.

[0139] D. Regulatory Regions

[0140] The choice of regulatory regions to be included in a recombinant construct depends upon several factors, including, but not limited to, efficiency, selectability, inducibility, desired expression level, and cell- or tissue-preferential expression. It is a routine matter for one of skill in the art to modulate the expression of a coding sequence by appropriately selecting and positioning regulatory regions relative to the coding sequence. Transcription of a nucleic acid can be modulated in a similar manner.

[0141] Some suitable regulatory regions initiate transcription only, or predominantly, in certain cell types. Methods for identifying and characterizing regulatory regions in plant genomic DNA are known, including, for example, those described in the following references: Jordano et al., Plant Cell, 1:855-866 (1989); Bustos et al., Plant Cell, 1:839-854 (1989); Green et al., EMBO J., 7:4035-4044 (1988); Meier et al., Plant Cell, 3:309-316 (1991); and Zhang et al., Plant Physiology, 110:1069-1079 (1996).

[0142] Examples of various classes of regulatory regions are described below. Some of the regulatory regions indicated below as well as additional regulatory regions are described in more detail in U.S. Patent Application Ser. Nos. 60/505,689; 60/518,075; 60/544,771; 60/558,869; 60/583,691; 60/619,181; 60/637,140; 60/757,544; 60/776,307; 10/957,569; 11/058,689; 11/172,703; 11/208,308; 11/274,890; 60/583,609; 60/612,891; 11/097,589; 11/233,726; 11/408,791; 11/414,142; 10/950,321; 11/360,017; PCT/US05/011105; PCT/US05/23639; PCT/US05/034308; PCT/US05/034343; and PCT/US06/038236; PCT/US06/040572; and PCT/US07/62762.

[0143] For example, the sequences of regulatory regions p326, YP0144, YP0190, p13879, YP0050, p32449, 21876, YP0158, YP0214, YP0380, PT0848, PT0633, YP0128, YP0275, PT0660, PT0683, PT0758, PT0613, PT0672, PT0688, PT0837, YP0092, PT0676, PT0708, YP0396, YP0007, YP0111, YP0103, YP0028, YP0121, YP0008, YP0039, YP0115, YP0119, YP0120, YP0374, YP0101, YP0102, YP0110, YP0117, YP0137, YP0285, YP0212, YP0097, YP0107, YP0088, YP0143, YP0156, PT0650, PT0695, PT0723, PT0838, PT0879, PT0740, PT0535, PT0668, PT0886, PT0585, YP0381, YP0337, PT0710, YP0356, YP0385, YP0384, YP0286, YP0377, PD1367, PT0863, PT0829, PT0665, PT0678, YP0086, YP0188, YP0263, PT0743 and YP0096 are set forth in the sequence listing of PCT/US06/040572; the sequence of regulatory region PT0625 is set forth in the sequence listing of PCT/US05/034343; the sequences of regulatory regions PT0623, YP0388, YP0087, YP0093, YP0108, YP0022 and YP0080 are set forth in the sequence listing of U.S. patent application Ser. No. 11/172,703; the sequence of regulatory region PRO924 is set forth in the sequence listing of PCT/US07/62762; and the sequences of regulatory regions p530c10, pOsFIE2-2, pOsMEA, pOsYp102, and pOsYp285 are set forth in the sequence listing of PCT/US06/038236.

[0144] It will be appreciated that a regulatory region may meet criteria for one classification based on its activity in one plant species, and yet meet criteria for a different classification based on its activity in another plant species.

[0145] i. Broadly Expressing Promoters

[0146] A promoter can be “broadly expressing” when it promotes transcription in all or most tissues, in more than one, but not necessarily in all, cell types within all tissues. For example, a broadly expressing promoter can promote transcription of an operably linked sequence in one or more of the shoot, shoot tip (apex), and leaves, but weakly or not at all in tissues such as roots or stems. As another example, a broadly expressing promoter can promote transcription of an operably linked sequence in one or more of the stem, shoot, shoot tip (apex), and leaves, but can promote transcription weakly or not at all in tissues such as reproductive tissues of flowers and developing seeds. Non-limiting examples of broadly expressing promoters that can be included in the nucleic acid constructs provided herein include the p326, YP0144, YP0190, p13879, YP0050, p32449, 21876, YP0158, YP0214, YP0380, PT0848, PD3141, and PT0633 promoters. See, e.g., WO/2009/099899. Additional examples include the cauliflower mosaic virus (CaMV) 35S promoter, the mannopine synthase (MAS) promoter, the 1′ or 2′ promoters derived from T-DNA of Agrobacterium tumefaciens, the figwort mosaic virus 34S promoter, actin promoters such as the rice actin promoter, and ubiquitin promoters such as the maize ubiquitin-1 promoter. In some cases, the CaMV 35S promoter is excluded from the category of broadly expressing promoters.

[0147] ii. Root Promoters

[0148] Root-active promoters confer transcription in root tissue, e.g., root endodermis, root epidermis, or root vascular tissues. In some embodiments, root-active promoters are root-preferential promoters, i.e., confer transcription only or predominantly in root tissue. Root-preferential promoters include the YP0128, YP0275, PT0625, PT0660, PT0683, and PT0758 promoters. Other root-preferential promoters include the PT0613, PT0672, PT0688, and PT0837 promoters, which drive transcription primarily in root tissue and to a lesser extent in ovules and/or seeds. Other examples of root-preferential promoters include the root-specific subdomains of the CaMV 35S promoter (Lam et al., Proc. Natl. Acad. Sci. USA, 86:7890-7894 (1989)), root cell specific promoters reported by Conkling et al., Plant Physiol., 93:1203-1211 (1990), and the tobacco RD2 promoter.

[0149] iii. Maturing Endosperm Promoters

[0150] In some embodiments, promoters that drive transcription in maturing endosperm can be useful. Transcription from a maturing endosperm promoter typically begins after fertilization and occurs primarily in endosperm tissue during seed development and is typically highest during the cellularization phase. Most suitable are promoters that are active predominantly in maturing endosperm, although promoters that are also active in other tissues can sometimes be used. Non-limiting examples of maturing endosperm promoters that can be included in the nucleic acid constructs provided herein include the napin promoter, the Arcelin-5 promoter, the phaseolin promoter (Bustos et al., Plant Cell, 1(9):839-853 (1989)), the soybean trypsin inhibitor promoter (Riggs et al., Plant Cell, 1(6):609-621 (1989)), the ACP promoter (Baerson et al., Plant Mol. Biol., 22(2):255-267 (1993)), the stearoyl-ACP desaturase promoter (Slocombe et al., Plant Physiol., 104(4):167-176 (1994)), the soybean α′ subunit of β-conglycinin promoter (Chen et al., Proc. Natl. Acad. Sci. USA, 83:8560-8564 (1986)), the oleosin promoter (Hong et al., Plant Mol. Biol., 34(3):549-555 (1997)), and zein promoters, such as the 15 kD zein promoter, the 16 kD zein promoter, 19 kD zein promoter, 22 kD zein promoter and 27 kD zein promoter. Also suitable are the Osgt-1 promoter from the rice glutelin-1 gene (Zheng et al., Mol. Cell. Biol., 13:5829-5842 (1993)), the beta-amylase promoter, and the barley hordein promoter. Other maturing endosperm promoters include the YP0092, PT0676, and PT0708 promoters.

[0151] iv. Ovary Tissue Promoters

[0152] Promoters that are active in ovary tissues such as the ovule wall and mesocarp can also be useful, e.g., a polygalacturonidase promoter, the banana TRX promoter, the melon actin promoter, YP0396, and PT0623. Examples of promoters that are active primarily in ovules include YP0007, YP0111, YP0092, YP0103, YP0028, YP0121, YP0008, YP0039, YP0115, YP0119, YP0120, and YP0374.

[0153] v. Embryo Sac/Early Endosperm Promoters

[0154] To achieve expression in embryo sac/early endosperm, regulatory regions can be used that are active in polar nuclei and/or the central cell, or in precursors to polar nuclei, but not in egg cells or precursors to egg cells. Most suitable are promoters that drive expression only or predominantly in polar nuclei or precursors thereto and/or the central cell. A pattern of transcription that extends from polar nuclei into early endosperm development can also be found with embryo sac/early endosperm-preferential promoters, although transcription typically decreases significantly in later endosperm development during and after the cellularization phase. Expression in the zygote or developing embryo typically is not present with embryo sac/early endosperm promoters.

[0155] Promoters that may be suitable include those derived from the following genes: Arabidopsis viviparous-1 (see, GenBank No. U93215); Arabidopsis atmycl (see, Urao, Plant Mol. Biol., 32:571-57 (1996); Conceicao, Plant, 5:493-505 (1994)); Arabidopsis FIE (GenBank No. AF129516); Arabidopsis MEA; Arabidopsis FIS2 (GenBank No. AF096096); and FIE 1.1 (U.S. Pat. No. 6,906,244). Other promoters that may be suitable include those derived from the following genes: maize MAC1 (see, Sheridan, Genetics, 142:1009-1020 (1996)); maize Cat3 (see, GenBank No. L05934; Abler, Plant Mol. Biol., 22:10131-1038 (1993)). Other promoters include the following Arabidopsis promoters: YP0039, YP0101, YP0102, YP0110, YP0117, YP0119, YP0137, DME, YP0285, and YP0212. Other promoters that may be useful include the following rice promoters: p530c10, pOsFIE2-2, pOsMEA, pOsYp102, and pOsYp285.

[0156] vi. Embryo Promoters

[0157] Regulatory regions that preferentially drive transcription in zygotic cells following fertilization can provide embryo-preferential expression. Most suitable are promoters that preferentially drive transcription in early stage embryos prior to the heart stage, but expression in late stage and maturing embryos is also suitable. Embryo-preferential promoters include the barley lipid transfer protein (Ltp1) promoter (Plant Cell Rep 20:647-654 (2001)), YP0097, YP0107, YP0088, YP0143, YP0156, PT0650, PT0695, PT0723, PT0838, PT0879, and PT0740.

[0158] vii. Photosynthetic Tissue Promoters

[0159] Promoters active in photosynthetic tissue confer transcription in green tissues such as leaves and stems. Most suitable are promoters that drive expression only or predominantly in such tissues. Examples of such promoters include the ribulose-1,5-bisphosphate carboxylase (RbcS) promoters such as the RbcS promoter from eastern larch (Larix laricina), the pine cab6 promoter (Yamamoto et al., Plant Cell Physiol., 35:773-778 (1994)), the Cab-1 promoter from wheat (Fejes et al., Plant Mol. Biol., 15:921-932 (1990)), the CAB-1 promoter from spinach (Lubberstedt et al., Plant Physiol., 104:997-1006 (1994)), the cab1R promoter from rice (Luan et al., Plant Cell, 4:971-981 (1992)), the pyruvate orthophosphate dikinase (PPDK) promoter from corn (Matsuoka et al., Proc. Natl. Acad. Sci. USA, 90:9586-9590 (1993)), the tobacco Lhcb1*2 promoter (Cerdan et al., Plant Mol. Biol., 33:245-255 (1997)), the Arabidopsis thaliana SUC2 sucrose-H+ symporter promoter (Truernit et al., Planta, 196:564-570 (1995)), and thylakoid membrane protein promoters from spinach (psaD, psaF, psaE, PC, FNR, atpC, atpD, cab, rbcS). Other photosynthetic tissue promoters include PT0535, PT0668, PT0886, YP0144, YP0380 and PT0585.

[0160] viii. Vascular Tissue Promoters

[0161] Examples of promoters that have high or preferential activity in vascular bundles include YP0087, YP0093, YP0108, YP0022, and YP0080. Other vascular tissue-preferential promoters include the glycine-rich cell wall protein GRP 1.8 promoter (Keller and Baumgartner, Plant Cell, 3(10):1051-1061 (1991)), the Commelina yellow mottle virus (CoYMV) promoter (Medberry et al., Plant Cell, 4(2):185-192 (1992)), and the rice tungro bacilliform virus (RTBV) promoter (Dai et al., Proc. Natl. Acad. Sci. USA, 101(2):687-692 (2004)).

[0162] ix. Inducible Promoters

[0163] Inducible promoters confer transcription in response to external stimuli such as chemical agents or environmental stimuli. For example, inducible promoters can confer transcription in response to hormones such as giberellic acid or ethylene, or in response to light or drought. Examples of drought-inducible promoters include YP0380, PT0848, YP0381, YP0337, PT0633, YP0374, PT0710, YP0356, YP0385, YP0396, YP0388, YP0384, PT0688, YP0286, YP0377, PD1367, and PD0901. Examples of nitrogen-inducible promoters include PT0863, PT0829, PT0665, and PT0886. Examples of shade-inducible promoters include PRO924 and PT0678. An example of a promoter induced by salt is rd29A (Kasuga et al. (1999) Nature Biotech 17: 287-291).

[0164] x. Basal Promoters

[0165] A basal promoter is the minimal sequence necessary for assembly of a transcription complex required for transcription initiation. Basal promoters frequently include a “TATA box” element that may be located between about 15 and about 35 nucleotides upstream from the site of transcription initiation. Basal promoters also may include a “CCAAT box” element (typically the sequence CCAAT) and/or a GGGCG sequence, which can be located between about 40 and about 200 nucleotides, typically about 60 to about 120 nucleotides, upstream from the transcription start site.

[0166] xi. Stem Promoters

[0167] A stem promoter may be specific to one or more stem tissues or specific to stem and other plant parts. Stem promoters may have high or preferential activity in, for example, epidermis and cortex, vascular cambium, procambium, or xylem. Examples of stem promoters include YP0018 which is disclosed in US20060015970 and CryIA(b) and CryIA(c) (Braga et al. 2003, Journal of New Seeds 5:209-221).

[0168] xIi. Reproductive Tissue Promoters

[0169] Reproductive tissue promoters are regulatory sequences that drive expression primarily in, but are not necessarily exclusive to, tissues that are required for plant sexual reproduction. These tissues include, but are not limited to, inflorescence meristem, floral meristem, floral organs, and cells of the gametophyte. Examples of promoters that express in reproductive tissues include PD3720 in PCT/US2009/038792.

[0170] xiii. Other Promoters

[0171] Other classes of promoters include, but are not limited to, shoot-preferential, callus-preferential, trichome cell-preferential, guard cell-preferential such as PT0678, tuber-preferential, parenchyma cell-preferential, and senescence-preferential promoters. Promoters designated YP0086, YP0188, YP0263, PT0758, PT0743, PT0829, YP0119, and YP0096, as described in the above-referenced patent applications, may also be useful.

[0172] xiv. Other Regulatory Regions

[0173] A 5′ untranslated region (UTR) can be included in nucleic acid constructs described herein. A 5′ UTR is transcribed, but is not translated, and lies between the start site of the transcript and the translation initiation codon and may include the +1 nucleotide. A 3′ UTR can be positioned between the translation termination codon and the end of the transcript. UTRs can have particular functions such as increasing mRNA stability or attenuating translation. Examples of 3′ UTRs include, but are not limited to, polyadenylation signals and transcription termination sequences, e.g., a nopaline synthase termination sequence.

[0174] It will be understood that more than one regulatory region may be present in a recombinant polynucleotide, e.g., introns, enhancers, upstream activation regions, transcription terminators, and inducible elements. Thus, for example, more than one regulatory region can be operably linked to the sequence of a polynucleotide encoding a biomass-modulating polypeptide.

[0175] Regulatory regions, such as promoters for endogenous genes, can be obtained by chemical synthesis or by subcloning from a genomic DNA that includes such a regulatory region. A nucleic acid comprising such a regulatory region can also include flanking sequences that contain restriction enzyme sites that facilitate subsequent manipulation.

### IV. TRANSGENIC PLANTS AND PLANT CELLS

[0176] A. Transformation

[0177] The invention also features transgenic plant cells and plants comprising at least one recombinant nucleic acid construct described herein. A plant or plant cell can be transformed by having a construct integrated into its genome, i.e., can be stably transformed. Stably transformed cells typically retain the introduced nucleic acid with each cell division. A plant or plant cell can also be transiently transformed such that the construct is not integrated into its genome. Transiently transformed cells typically lose all or some portion of the introduced nucleic acid construct with each cell division such that the introduced nucleic acid cannot be detected in daughter cells after a sufficient number of cell divisions. Both transiently transformed and stably transformed transgenic plants and plant cells can be useful in the methods described herein.

[0178] Transgenic plant cells used in methods described herein can constitute part or all of a whole plant. Such plants can be grown in a manner suitable for the species under consideration, either in a growth chamber, a greenhouse, or in a field. Transgenic plants can be bred as desired for a particular purpose, e.g., to introduce a recombinant nucleic acid into other lines, to transfer a recombinant nucleic acid to other species, or for further selection of other desirable traits. Alternatively, transgenic plants can be propagated vegetatively for those species amenable to such techniques. As used herein, a transgenic plant also refers to progeny of an initial transgenic plant provided the progeny inherits the transgene. Seeds produced by a transgenic plant can be grown and then selfed (or outcrossed and selfed) to obtain seeds homozygous for the nucleic acid construct.

[0179] Transgenic plants can be grown in suspension culture, or tissue or organ culture. For the purposes of this invention, solid and/or liquid tissue culture techniques can be used. When using solid medium, transgenic plant cells can be placed directly onto the medium or can be placed onto a filter that is then placed in contact with the medium. When using liquid medium, transgenic plant cells can be placed onto a flotation device, e.g., a porous membrane that contacts the liquid medium. A solid medium can be, for example, Murashige and Skoog (MS) medium containing agar and a suitable concentration of an auxin, e.g., 2,4-dichlorophenoxyacetic acid (2,4-D), and a suitable concentration of a cytokinin, e.g., kinetin.

[0180] When transiently transformed plant cells are used, a reporter sequence encoding a reporter polypeptide having a reporter activity can be included in the transformation procedure and an assay for reporter activity or expression can be performed at a suitable time after transformation. A suitable time for conducting the assay typically is about 1-21 days after transformation, e.g., about 1-14 days, about 1-7 days, or about 1-3 days. The use of transient assays is particularly convenient for rapid analysis in different species, or to confirm expression of a heterologous biomass-modulating polypeptide whose expression has not previously been confirmed in particular recipient cells.

[0181] Techniques for introducing nucleic acids into monocotyledonous and dicotyledonous plants are known in the art, and include, without limitation, Agrobacterium-mediated transformation, viral vector-mediated transformation, electroporation and particle gun transformation, e.g., U.S. Pat. Nos. 5,538,880; 5,204,253; 6,329,571 and 6,013,863. If a cell or cultured tissue is used as the recipient tissue for transformation, plants can be regenerated from transformed cultures if desired, by techniques known to those skilled in the art.

[0182] B. Screening/Selection

[0183] A population of transgenic plants can be screened and/or selected for those members of the population that have a trait or phenotype conferred by expression of the transgene. For example, a population of progeny of a single transformation event can be screened for those plants having a desired level of expression of a biomass-modulating polypeptide or nucleic acid. Physical and biochemical methods can be used to identify expression levels. These include Southern analysis or PCR amplification for detection of a polynucleotide; Northern blots, S1 RNase protection, primer-extension, or RT-PCR amplification for detecting RNA transcripts; enzymatic assays for detecting enzyme or ribozyme activity of polypeptides and polynucleotides; and protein gel electrophoresis, Western blots, immunoprecipitation, and enzyme-linked immunoassays to detect polypeptides. Other techniques such as in situ hybridization, enzyme staining, and immunostaining also can be used to detect the presence or expression of polypeptides and/or polynucleotides. Methods for performing all of the referenced techniques are known. As an alternative, a population of plants comprising independent transformation events can be screened for those plants having a desired trait, such as a modulated level of biomass. Selection and/or screening can be carried out over one or more generations, and/or in more than one geographic location. In some cases, transgenic plants can be grown and selected under conditions which induce a desired phenotype or are otherwise necessary to produce a desired phenotype in a transgenic plant. In addition, selection and/or screening can be applied during a particular developmental stage in which the phenotype is expected to be exhibited by the plant. Selection and/or screening can be carried out to choose those transgenic plants having a statistically significant difference in a biomass level relative to a control plant that lacks the transgene. Selected or screened transgenic plants have an altered phenotype as compared to a corresponding control plant, as described in the “Transgenic Plant Phenotypes” section herein.

[0184] C. Plant Species

[0185] The polynucleotides and vectors described herein can be used to transform a number of monocotyledonous and dicotyledonous plants and plant cell systems, including species from one of the following families: Acanthaceae, Alliaceae, Alstroemeriaceae, Amaryllidaceae, Apocynaceae, Arecaceae, Asteraceae, Berberidaceae, Bixaceae, Brassicaceae, Bromeliaceae, Cannabaceae, Caryophyllaceae, Cephalotaxaceae, Chenopodiaceae, Colchicaceae, Cucurbitaceae, Dioscoreaceae, Ephedraceae, Erythroxylaceae, Euphorbiaceae, Fabaceae, Lamiaceae, Linaceae, Lycopodiaceae, Malvaceae, Melanthiaceae, Musaceae, Myrtaceae, Nyssaceae, Papaveraceae, Pinaceae, Plantaginaceae, Poaceae, Rosaceae, Rubiaceae, Salicaceae, Sapindaceae, Solanaceae, Taxaceae, Theaceae, or Vitaceae.

[0186] Suitable species may include members of the genus Abelmoschus, Abies, Acer, Agrostis, Allium, Alstroemeria, Ananas, Andrographis, Andropogon, Artemisia, Arundo, Atropa, Berberis, Beta, Bixa, Brassica, Calendula, Camellia, Camptotheca, Cannabis, Capsicum, Carthamus, Catharanthus, Cephalotaxus, Chrysanthemum, Cinchona, Citrullus, Coffea, Colchicum, Coleus, Cucumis, Cucurbita, Cynodon, Datura, Dianthus, Digitalis, Dioscorea, Elaeis, Ephedra, Erianthus, Erythroxylum, Eucalyptus, Festuca, Fragaria, Galanthus, Glycine, Gossypium, Helianthus, Hevea, Hordeum, Hyoscyamus, Jatropha, Lactuca, Linum, Lolium, Lupinus, Lycopersicon, Lycopodium, Manihot, Medicago, Mentha, Miscanthus, Musa, Nicotiana, Oryza, Panicum, Papaver, Parthenium, Pennisetum, Petunia, Phalaris, Phleum, Pinus, Poa, Poinsettia, Populus, Rauwolfia, Ricinus, Rosa, Saccharum, Salix, Sanguinaria, Scopolia, Secale, Solanum, Sorghum, Spartina, Spinacea, Tanacetum, Taxus, Theobroma, Triticosecale, Triticum, Uniola, Veratrum, Vinca, Vitis, and Zea.

[0187] Suitable species include Panicum spp., Sorghum spp., Miscanthus spp., Saccharum spp., Erianthus spp., Populus spp., Andropogon gerardii (big bluestem), Pennisetum purpureum (elephant grass), Phalaris arundinacea (reed canarygrass), Cynodon dactylon (bermudagrass), Festuca arundinacea (tall fescue), Spartina pectinata (prairie cord-grass), Medicago sativa (alfalfa), Arundo donax (giant reed), Secale cereale (rye), Salix spp. (willow), Eucalyptus spp. (eucalyptus), Triticosecale (triticum—wheat X rye) and bamboo.

[0188] Suitable species also include Helianthus annuus (sunflower), Carthamus tinctorius (safflower), Jatropha curcas (jatropha), Ricinus communis (castor), Elaeis guineensis (palm), Linum usitatissimum (flax), and Brassica juncea.

[0189] Suitable species also include Beta vulgaris (sugarbeet), and Manihot esculenta (cassava)

[0190] Suitable species also include Lycopersicon esculentum (tomato), Lactuca sativa (lettuce), Musa paradisiaca (banana), Solanum tuberosum (potato), Brassica oleracea (broccoli, cauliflower, Brussels sprouts), Camellia sinensis (tea), Fragaria ananassa (strawberry), Theobroma cacao (cocoa), Coffea arabica (coffee), Vitis vinifera (grape), Ananas comosus (pineapple), Capsicum annum (hot & sweet pepper), Allium cepa (onion), Cucumis melo (melon), Cucumis sativus (cucumber), Cucurbita maxima (squash), Cucurbita moschata (squash), Spinacea oleracea (spinach), Citrullus lanatus (watermelon), Abelmoschus esculentus (okra), and Solanum melongena (eggplant).

[0191] Suitable species also include Papaver somniferum (opium poppy), Papaver orientale, Taxus baccata, Taxus brevifolia, Artemisia annua, Cannabis sativa, Camptotheca acuminate, Catharanthus roseus, Vinca rosea, Cinchona officinalis, Colchicum autumnale, Veratrum californica, Digitalis lanata, Digitalis purpurea, Dioscorea spp., Andrographis paniculata, Atropa belladonna, Datura stomonium, Berberis spp., Cephalotaxus spp., Ephedra sinica, Ephedra spp., Erythroxylum coca, Galanthus wornorii, Scopolia spp., Lycopodium serratum (Huperzia serrata), Lycopodium spp., Rauwolfia serpentina, Rauwolfia spp., Sanguinaria canadensis, Hyoscyamus spp., Calendula officinalis, Chrysanthemum parthenium, Coleus forskohlii, and Tanacetum parthenium.

[0192] Suitable species also include Parthenium argentatum (guayule), Hevea spp. (rubber), Mentha spicata (mint), Mentha piperita (mint), Bixa orellana, and Alstroemeria spp.

[0193] Suitable species also include Rosa spp. (rose), Dianthus caryophyllus (carnation), Petunia spp. (petunia) and Poinsettia pulcherrima (poinsettia).

[0194] Suitable species also include Nicotiana tabacum (tobacco), Lupinus albus (lupin), Uniola paniculata (oats), bentgrass (Agrostis spp.), Populus tremuloides (aspen), Pinus spp. (pine), Abies spp. (fir), Acer spp. (maple), Hordeum vulgare (barley), Poa pratensis (bluegrass), Lolium spp. (ryegrass) and Phleum pratense (timothy).

[0195] Thus, the methods and compositions can be used over a broad range of plant species, including species from the dicot genera Brassica, Carthamus, Glycine, Gossypium, Helianthus, Jatropha, Parthenium, Populus, and Ricinus; and the monocot genera Elaeis, Festuca, Hordeum, Lolium, Oryza, Panicum, Pennisetum, Phleum, Poa, Saccharum, Secale, Sorghum, Triticosecale, Triticum, and Zea. In some embodiments, a plant is a member of the species Panicum virgatum (switchgrass), Sorghum bicolor (sorghum, sudangrass), Miscanthus giganteus (miscanthus), Saccharum sp. (energycane), Populus balsamifera (poplar), Zea mays (corn), Glycine max (soybean), Brassica napus (canola), Triticum aestivum (wheat), Gossypium hirsutum (cotton), Oryza sativa (rice), Helianthus annuus (sunflower), Medicago sativa (alfalfa), Beta vulgaris (sugarbeet), or Pennisetum glaucum (pearl millet).

[0196] In certain embodiments, the polynucleotides and vectors described herein can be used to transform a number of monocotyledonous and dicotyledonous plants and plant cell systems, wherein such plants are hybrids of different species or varieties of a specific species (e.g., Saccharum sp. X Miscanthus sp., Sorghum sp. X Miscanthus sp.)

[0197] D. Transgenic Plant Phenotypes

[0198] In some embodiments, a plant in which expression of a biomass-modulating polypeptide is modulated can have increased levels of biomass in plants. For example, a biomass-modulating polypeptide described herein can be expressed in a transgenic plant, resulting in increased levels of vegetative tissue. The biomass level can be increased by at least 2 percent, e.g., 2, 3, 4, 5, 6, 7, 8, 9, 10, 11, 12, 13, 14, 15, 16, 17, 18, 19, 20, 25, 30, 35, 40, 45, 50, 55, 60, or more than 60 percent, as compared to the biomass level in a corresponding control plant that does not express the transgene. In some embodiments, a plant in which expression of a biomass-modulating polypeptide is modulated can have decreased levels of seed production. The level can be decreased by at least 2 percent, e.g., 2, 3, 4, 5, 10, 15, 20, 25, 30, 35, or more than 35 percent, as compared to the seed production level in a corresponding control plant that does not express the transgene.

[0199] Increases in seed production in such plants can provide improved nutritional availability in geographic locales where intake of plant foods is often insufficient, or for biofuel production. In some embodiments, decreases in biomass in such plants can be useful in situations where vegetative tissues are not the primary plant part that is harvested for human or animal consumption (i.e., seeds are harvested).

[0200] In some embodiments, a plant in which expression of a biomass-modulating polypeptide is modulated can have increased or decreased levels of biomass in one or more plant tissues, e.g., vegetative tissues, reproductive tissues, or root tissues. For example, the biomass level can be increased by at least 2 percent, e.g., 2, 3, 4, 5, 6, 7, 8, 9, 10, 11, 12, 13, 14, 15, 16, 17, 18, 19, 20, 25, 30, 35, 40, 45, 50, 55, 60, or more than 60 percent, as compared to the biomass level in a corresponding control plant that does not express the transgene. In some embodiments, a plant in which expression of a biomass-modulating polypeptide is modulated can have decreased levels of biomass in one or more plant tissues. The biomass level can be decreased by at least 2 percent, e.g., 2, 3, 4, 5, 10, 15, 20, 25, 30, 35, or more than 35 percent, as compared to the biomass level in a corresponding control plant that does not express the transgene.

[0201] Increases in biomass in such plants can provide improved food quantity, or improved energy production. Decreases in biomass can provide more efficient partitioning of nutrients to plant part(s) that are harvested for human or animal consumption.

[0202] Typically, a difference in the amount of biomass in a transgenic plant or cell relative to a control plant or cell is considered statistically significant at p≦0.05 with an appropriate parametric or non-parametric statistic, e.g., Chi-square test, Student's t-test, Mann-Whitney test, or F-test. In some embodiments, a difference in the amount of biomass is statistically significant at p<0.01, p<0.005, or p<0.001. A statistically significant difference in, for example, the amount of biomass in a transgenic plant compared to the amount of a control plant indicates that the recombinant nucleic acid present in the transgenic plant results in altered biomass levels.

[0203] The phenotype of a transgenic plant is evaluated relative to a control plant. A plant is said “not to express” a polypeptide when the plant exhibits less than 10%, e.g., less than 9%, 8%, 7%, 6%, 5%, 4%, 3%, 2%, 1%, 0.5%, 0.1%, 0.01%, or 0.001%, of the amount of polypeptide or mRNA encoding the polypeptide exhibited by the plant of interest. Expression can be evaluated using methods including, for example, RT-PCR, Northern blots, S1 RNase protection, primer extensions, Western blots, protein gel electrophoresis, immunoprecipitation, enzyme-linked immunoassays, chip assays, and mass spectrometry. It should be noted that if a polypeptide is expressed under the control of a tissue-preferential or broadly expressing promoter, expression can be evaluated in the entire plant or in a selected tissue. Similarly, if a polypeptide is expressed at a particular time, e.g., at a particular time in development or upon induction, expression can be evaluated selectively at a desired time period.

[0204] Biomass can include harvestable plant tissues such as leaves, stems, and reproductive structures, or all plant tissues such as leaves, stems, roots, and reproductive structures. In some embodiments, biomass encompasses only above ground plant parts. In some embodiments, biomass encompasses only stem plant parts. In some embodiments, biomass encompasses only above ground plant parts except inflorescence and seed parts of a plant. Biomass can be measured as described in the examples section. Biomass can be quantified as dry matter yield, which is the mass of biomass produced (usually reported in T/acre) if the contribution of water is subtracted from the fresh mater weight. Dry matter yield (DMY) yield is calculated using the fresh matter weight (FMW) and a measurement of weight percent moisture (M) in the following equation. DMY=((100−M)/100)*FMW. Biomass can be quantified as fresh matter yield, which is the mass of biomass produced (usually reported in T/acre) on an as-received basis, which includes the weight of moisture.

### V. PLANT BREEDING

[0205] Genetic polymorphisms are discrete allelic sequence differences in a population. Typically, an allele that is present at 1% or greater is considered to be a genetic polymorphism. The discovery that polypeptides disclosed herein can modulate biomass content is useful in plant breeding, because genetic polymorphisms exhibiting a degree of linkage with loci for such polypeptides are more likely to be correlated with variation in a biomass trait. For example, genetic polymorphisms linked to the loci for such polypeptides are more likely to be useful in marker-assisted breeding programs to create lines having a desired modulation in the biomass trait.

[0206] Thus, one aspect of the invention includes methods of identifying whether one or more genetic polymorphisms are associated with variation in a biomass trait. Such methods involve determining whether genetic polymorphisms in a given population exhibit linkage with the locus for one of the polypeptides depicted in FIGS. 1 to 7 and/or a functional homolog thereof, such as, but not limited to those identified in the Sequence Listing of this application. The correlation is measured between variation in the biomass trait in plants of the population and the presence of the genetic polymorphism(s) in plants of the population, thereby identifying whether or not the genetic polymorphism(s) are associated with variation for the trait. If the presence of a particular allele is statistically significantly correlated with a desired modulation in the biomass trait, the allele is associated with variation for the trait and is useful as a marker for the trait. If, on the other hand, the presence of a particular allele is not significantly correlated with the desired modulation, the allele is not associated with variation for the trait and is not useful as a marker.

[0207] Such methods are applicable to populations containing the naturally occurring endogenous polypeptide rather than an exogenous nucleic acid encoding the polypeptide, i.e., populations that are not transgenic for the exogenous nucleic acid. It will be appreciated, however, that populations suitable for use in the methods may contain a transgene for another, different trait, e.g., herbicide resistance.

[0208] Genetic polymorphisms that are useful in such methods include simple sequence repeats (SSRs, or microsatellites), rapid amplification of polymorphic DNA (RAPDs), single nucleotide polymorphisms (SNPs), amplified fragment length polymorphisms (AFLPs) and restriction fragment length polymorphisms (RFLPs). SSR polymorphisms can be identified, for example, by making sequence specific probes and amplifying template DNA from individuals in the population of interest by PCR. If the probes flank an SSR in the population, PCR products of different sizes will be produced. See, e.g., U.S. Pat. No. 5,766,847. Alternatively, SSR polymorphisms can be identified by using PCR product(s) as a probe against Southern blots from different individuals in the population. See, U. H. Refseth et al., (1997) Electrophoresis 18: 1519. The identification of RFLPs is discussed, for example, in Alonso-Blanco et al. (Methods in Molecular Biology, vol. 82, “Arabidopsis Protocols”, pp. 137-146, J. M. Martinez-Zapater and J. Salinas, eds., c. 1998 by Humana Press, Totowa, N.J.); Burr (“Mapping Genes with Recombinant Inbreds”, pp. 249-254, in Freeling, M. and V. Walbot (Ed.), The Maize Handbook, c. 1994 by Springer-Verlag New York, Inc.: New York, N.Y., USA; Berlin Germany; Burr et al. Genetics (1998) 118: 519; and Gardiner, J. et al., (1993) Genetics 134: 917). The identification of AFLPs is discussed, for example, in EP 0 534 858 and U.S. Pat. No. 5,878,215.

[0209] In some embodiments, the methods are directed to breeding a plant line. Such methods use genetic polymorphisms identified as described above in a marker assisted breeding program to facilitate the development of lines that have a desired alteration in the biomass trait. Once a suitable genetic polymorphism is identified as being associated with variation for the trait, one or more individual plants are identified that possess the polymorphic allele correlated with the desired variation. Those plants are then used in a breeding program to combine the polymorphic allele with a plurality of other alleles at other loci that are correlated with the desired variation. Techniques suitable for use in a plant breeding program are known in the art and include, without limitation, backcrossing, mass selection, pedigree breeding, bulk selection, crossing to another population and recurrent selection. These techniques can be used alone or in combination with one or more other techniques in a breeding program. Thus, each identified plants is selfed or crossed a different plant to produce seed which is then germinated to form progeny plants. At least one such progeny plant is then selfed or crossed with a different plant to form a subsequent progeny generation. The breeding program can repeat the steps of selfing or outcrossing for an additional 0 to 5 generations as appropriate in order to achieve the desired uniformity and stability in the resulting plant line, which retains the polymorphic allele. In most breeding programs, analysis for the particular polymorphic allele will be carried out in each generation, although analysis can be carried out in alternate generations if desired.

[0210] In some cases, selection for other useful traits is also carried out, e.g., selection for fungal resistance or bacterial resistance. Selection for such other traits can be carried out before, during or after identification of individual plants that possess the desired polymorphic allele.

### VI. ARTICLES OF MANUFACTURE

[0211] Transgenic plants provided herein have various uses in the agricultural and energy production industries. For example, transgenic plants described herein can be used to make animal feed and food products. Such plants, however, are often particularly useful as a feedstock for energy production.

[0212] Transgenic plants described herein often produce higher yields of grain and/or biomass per hectare, relative to control plants that lack the exogenous nucleic acid. In some embodiments, such transgenic plants provide equivalent or even increased yields of grain and/or biomass per hectare relative to control plants when grown under conditions of reduced inputs such as fertilizer and/or water. Thus, such transgenic plants can be used to provide yield stability at a lower input cost and/or under environmentally stressful conditions such as drought. In some embodiments, plants described herein have a composition that permits more efficient processing into free sugars, and subsequently ethanol, for energy production. In some embodiments, such plants provide higher yields of ethanol, butanol, dimethyl ether, other biofuel molecules, and/or sugar-derived co-products per kilogram of plant material, relative to control plants. Such processing efficiencies are believed to be derived from the composition of the plant material, including, but not limited to, content of glucan, cellulose, hemicellulose, and lignin. By providing higher biomass yields at an equivalent or even decreased cost of production, the transgenic plants described herein improve profitability for farmers and processors as well as decrease costs to consumers.

[0213] Seeds from transgenic plants described herein can be conditioned and bagged in packaging material by means known in the art to form an article of manufacture. Packaging material such as paper and cloth are well known in the art. A package of seed can have a label, e.g., a tag or label secured to the packaging material, a label printed on the packaging material, or a label inserted within the package, that describes the nature of the seeds therein.

[0214] The invention will be further described in the following examples, which do not limit the scope of the invention described in the claims.

### VII. EXAMPLES

### Example 1

### Transgenic Rice Plants

[0215] The following symbols are used in with respect to rice transformation: T₀: plant regenerated from transformed tissue culture; T₁: first generation progeny of self-pollinated T₀ plants; T₂: second generation progeny of self-pollinated T₁ plants; T₃: third generation progeny of self-pollinated T₂ plants.

[0216] The following is a list of nucleic acids that were isolated from Arabidopsis thaliana plants: CeresClone:33232, CeresClone:29678, CeresAnnot:876994, CeresClone:158734, and CeresAnnot:863641. The following nucleic acids were isolated from Zea mays plants: CeresClone: 1554933 and CeresClone:258841.

[0217] Each isolated nucleic acid described above was cloned into a Ti plasmid vector containing a phosphinothricin acetyltransferase gene which confers Finale™ resistance to transformed plants. Constructs were made using CeresClone:33232, CeresClone:29678, CeresAnnot:876994, CeresClone:158734, CeresAnnot:863641, CeresClone: 1554933 and CeresClone:258841 that contained each operably linked to a 326F promoter construct was introduced into callus cells of the rice cultivar Kitaake by an Agrobacterium-mediated transformation protocol. Approximately 20-30 independent T₀ transgenic plants were generated from each transformation, as well as for the control plasmid (empty vector). Preliminary phenotypic analysis indicated that T₀ transformants did not show any significant phenotypic anomalies in vegetative organs, with a few exceptions where some plants appeared small with reduced fertility, most likely due to tissue culture effects.

[0218] T₀ plants were grown in a greenhouse, allowed to self-pollinate, and T₁ seeds collected. T₁ plants were grown in a field. The presence of each construct was confirmed by PCR.

### Example 2

### Screening for Biomass in Transgenic Rice Plants

[0219] Dry weight measurements for CW00233, CW00327, CW00305, and CW00539 were collected from T₁ plants that were grown in Langfang, China. The stems with leaves and leaf sheaths but without panicles were dried in a greenhouse for at least a month, and then weighed for each plant (all tillers weighed together for each plant). Dry weight measurements for CW00012 were collected from T₁ plants that were grown in Beijing, China. The stems with leaves and leaf sheaths but without panicles were dried in a room for at least a month, and then weighed for each plant (all tillers weighed together for each plant). Tiller number measurements for CW00012 were collected from T₁ plants that were grown in Beijing, China. Tiller number was counted after 4 months of growth. Tiller number measurements for CW00226 and CW00212 were collected from T₁ plants that were grown in Hainan, China. Tiller number was counted after 3 months of growth. Plant height measurements for CW00212 were collected from T₁ plants that were grown in Hainan, China. Plant height was measured after 4 months of growth.

### Example 3

### Results for CW00212 events (SEQ ID NO: 106)

[0220] T₁ seed from two events of CW00212 containing CeresClone:33232 was analyzed for tiller number as described in Example 2. The percent tiller number of transgenic T₁ plants in comparison to plants not containing the transgene grown at the same location is shown in Table 1. T-tests indicated that the measured decrease in comparison to plants not containing the transgene was statistically significant.

[0221] T₁ seed from two events of CW00212 containing CeresClone:33232 was analyzed for plant height as described in Example 2. The percent change in height of transgenic T₁ plants in comparison to plants not containing the transgene grown at the same location is shown in Table 2. T-tests indicated that the measured increase in comparison to plants not containing the transgene was statistically significant.

TABLE 1

| | No. of plants | Percent change in | |
|---|---|---|---|
| | evaluated | transgenic plant | |
| Event | (transgenic/control) | tiller number | P value |
| CW00212-03 | 9/36 | −13 | 0.09057 |
| CW00212-06 | 9/25 | −6 | 0.54964 |
| CW00212-08 | 9/11 | −43 | 2.4413e−005 |
| CW00212-10 | 9/20 | −31 | 1.2995e−005 |
| CW00212-11 | 9/26 | −28 | 5.2949e−005 |
| CW00212-12 | 9/26 | −27 | 0.0002306 |

TABLE 2

| | No. of plants | Percent change in | |
|---|---|---|---|
| | evaluated | transgenic | |
| Event | (transgenic/control) | plant height | P value |
| CW00212-02 | 9/11 | 11 | 0.09020 |
| CW00212-03 | 9/36 | 5 | 0.12250 |
| CW00212-05 | 9/16 | 14 | 0.02150 |
| CW00212-06 | 9/25 | 6 | 0.2736 |
| CW00212-07 | 9/9 | 2 | 0.4266 |
| CW00212-08 | 9/11 | 2 | 0.3783 |
| CW00212-11 | 9/26 | 9 | 0.001701 |
| CW00212-12 | 9/26 | 13 | 1.9827e−007 |

### Example 4

### Results for CW00012 (CeresClone 29678) Events (SEQ ID NO: 2)

[0222] T₁ seed from two events of CW00012 containing CeresClone:29678 was analyzed for biomass using dry weight measurements as described in Example 2. The percent dry weight increase of transgenic T₁ plants in comparison to plants not containing the transgene grown at the same location is shown in Table 3. T-tests indicated that confidence in the measured increase in comparison to plants not containing the transgene was statistically significant.

[0223] T₁ seed from two events of CW00012 containing CeresClone:29678 was analyzed for tiller number as described in Example 2. The percent increase in tiller number of transgenic T₁ plants in comparison to plants not containing the transgene grown at the same location is shown in Table 3. T-tests indicated that the measured increase in comparison to plants not containing the transgene was statistically significant.

TABLE 3

| | | | Percent | |
|---|---|---|---|---|
| | No. of plants | Percent | tiller | |
| | evaluated | dry weight | number | |
| Event | (transgenic/control) | increase | increase | P value |
| CW00012-06 | 19/38 | 13 | | 0.01331 |
| CW00012-08 | 19/38 | 39 | | 0.006982 |
| CW00012-06 | 19/38 | | 61 | 3.2537 |
| CW00012-08 | 19/38 | | 16 | 0.1243 |

### Example 5

### Results for CW00327 Events (SEQ ID NO: 521)

[0224] T₁ seed from two events of CW00327 containing CeresClone:258841 was analyzed for biomass using dry weight measurements as described in Example 2. The percent dry weight of transgenic T₁ plants in comparison to wild type plants (100%) grown at the same location is shown in Table 4. T-tests indicated that the measured increase in comparison to wild type controls was statistically significant.

TABLE 4

| | No. of plants | | | |
|---|---|---|---|---|
| | evaluated | Transgenic | Wild type | |
| | (transgenic/ | Percent | Percent | |
| Event | control) | dry weight | dry weight | P value |
| CW00327-23 | 15/29 | 134.34 | 100 | 0.005161 |
| CW00327-27 | 15/29 | 158.52 | 100 | 0.002284 |

### Example 6

### Results for CW00233 events (SEQ ID NO:315)

[0225] T₁ seed from two events of CW00233 containing CeresAnnot:876994 was analyzed for biomass using dry weight measurements as described in Example 2. The percent dry weight of transgenic T₁ plants over a wild type plants grown at the same location is shown in Table 5. T-tests indicated that the measured increase in comparison to wild type controls was statistically significant.

TABLE 5

| | No. of plants | | | |
|---|---|---|---|---|
| | evaluated | Transgenic | Wild type | |
| | (transgenic/ | Percent | Percent | |
| Event | control) | dry weight | dry weight | P value |
| CW00233-02 | 13/45 | 156.09 | 100 | 0.0001019 |
| CW00233-04 | 13/45 | 141.43 | 100 | 0.0001710 |

### Example 7

### Results for CW00226 Events (SEQ ID NO: 165)

[0226] T₁ seed from two events of CW00226 containing CeresClone:158734 was analyzed for biomass using tiller number measurements as described in Example 2. The percent tiller number of transgenic T₁ plants in comparison to plants not containing the transgene grown at the same location is shown in Table 6. T-tests indicated that the measured decrease in comparison to plants not containing the transgene was statistically significant.

TABLE 6

| | No. of plants | Percent change in | |
|---|---|---|---|
| | evaluated | transgenic plant | |
| Event | (transgenic/control) | tiller number | P value |
| CW00226-02 | 24/90 | −14 | 0.07154 |
| CW00226-04 | 11/90 | −26 | 0.02522 |
| CW00226-05 | 16/90 | −25 | 0.009534 |
| CW00226-06 | 20/90 | −24 | 0.001375 |
| CW00226-07 | 19/90 | −32 | 5.9835e−005 |

### Example 8

### Results for CW00305 Events (SEQ ID NO:474)

[0227] T₁ seed from two events of CW00305 containing CeresClone: 1554933 was analyzed for biomass using dry weight measurements as described in Example 2. The percent dry weight increase of transgenic T₁ plants in comparison to plants not containing the transgene grown at the same location is shown in Table 7. T-tests indicated that the measured increase in comparison to plants not containing the transgene was statistically significant.

TABLE 7

| | No. of plants | | |
|---|---|---|---|
| | evaluated | Percent dry weight | |
| Event | (transgenic/control) | increase | P value |
| CW00305-11 | 15/30 | 25 | 0.004823 |
| CW00305-08 | 15/30 | 51 | 0.008899 |

### Example 9

### Results for CW00539 Events (SEQ ID NO: 591)

[0228] T₁ seed from two events of CW00539 containing CeresAnnot:863641 was analyzed for biomass using dry weight measurements as described in Example 2. The percent dry weight increase of transgenic T₁ plants in comparison to plants not containing the transgene grown at the same location is shown in Table 8. T-tests indicated that the measured increase in comparison to plants not containing the transgene were statistically significant.

TABLE 8

| | No. of plants | | |
|---|---|---|---|
| | evaluated | Percent dry weight | |
| Event | (transgenic/control) | increase | P value |
| CW00539-31 | 5/10 | 49 | 0.003775 |
| CW00539-05 | 14/10 | 57 | 0.0004896 |

### Example 10

### Determination of Functional Homologs by Reciprocal BLAST

[0229] A candidate sequence was considered a functional homolog of a reference sequence if the candidate and reference sequences encoded proteins having a similar function and/or activity. A process known as Reciprocal BLAST (Rivera et al., Proc. Natl. Acad. Sci. USA, 95:6239-6244 (1998)) was used to identify potential functional homolog sequences from databases consisting of all available public and proprietary peptide sequences, including NR from NCBI and peptide translations from Ceres clones.

[0230] Before starting a Reciprocal BLAST process, a specific reference polypeptide was searched against all peptides from its source species using BLAST in order to identify polypeptides having BLAST sequence identity of 80% or greater to the reference polypeptide and an alignment length of 85% or greater along the shorter sequence in the alignment. The reference polypeptide and any of the aforementioned identified polypeptides were designated as a cluster.

[0231] The BLASTP version 2.0 program from Washington University at Saint Louis, Mo., USA was used to determine BLAST sequence identity and E-value. The BLASTP version 2.0 program includes the following parameters: 1) an E-value cutoff of 1.0e-5; 2) a word size of 5; and 3) the -postsw option. The BLAST sequence identity was calculated based on the alignment of the first BLAST HSP (High-scoring Segment Pairs) of the identified potential functional homolog sequence with a specific reference polypeptide. The number of identically matched residues in the BLAST HSP alignment was divided by the HSP length, and then multiplied by 100 to get the BLAST sequence identity. The HSP length typically included gaps in the alignment, but in some cases gaps were excluded.

[0232] The main Reciprocal BLAST process consists of two rounds of BLAST searches; forward search and reverse search. In the forward search step, a reference polypeptide sequence, “polypeptide A,” from source species SA was BLASTed against all protein sequences from a species of interest. Top hits were determined using an E-value cutoff of 10⁻⁵ and a sequence identity cutoff of 35%. Among the top hits, the sequence having the lowest E-value was designated as the best hit, and considered a potential functional homolog or ortholog. Any other top hit that had a sequence identity of 80% or greater to the best hit or to the original reference polypeptide was considered a potential functional homolog or ortholog as well. This process was repeated for all species of interest.

[0233] In the reverse search round, the top hits identified in the forward search from all species were BLASTed against all protein sequences from the source species SA. A top hit from the forward search that returned a polypeptide from the aforementioned cluster as its best hit was also considered as a potential functional homolog.

[0234] Functional homologs were identified by manual inspection of potential functional homolog sequences. Representative functional homologs for SEQ ID NO: 2, 106, 165, 315, 474, 521, or 591 are shown in FIGS. 1-7, respectively. Additional exemplary homologs are correlated to certain Figures in the Sequence Listing.

### Example 11

### Determination of Functional Homologs by Hidden Markov Models

[0235] Hidden Markov Models (HMMs) were generated by the program HMMER 2.3.2. To generate each HMM, the default HMMER 2.3.2 program parameters, configured for local alignments, were used.

[0236] An HMM was generated using the sequences shown in FIG. 1 as input. These sequences were fitted to the model and a representative HMM bit score for each sequence is shown in the Sequence Listing. Additional sequences were fitted to the model, and representative HMM bit scores for any such additional sequences are shown in the Sequence Listing. The results indicate that these additional sequences are functional homologs of SEQ ID NO: 2.

[0237] The procedure above was repeated and an HMM was generated for each group of sequences shown in FIGS. 2, 3, 4, 5, 6, and 7, using the sequences shown in each Figure as input for that HMM. A representative bit score for each sequence is shown in the Sequence Listing. Additional sequences were fitted to certain HMMs, and representative HMM bit scores for such additional sequences are shown in the Sequence Listing. The results indicate that these additional sequences are functional homologs of the sequences used to generate that HMM.

### Other Embodiments

[0238] It is to be understood that while the invention has been described in conjunction with the detailed description thereof, the foregoing description is intended to illustrate and not limit the scope of the invention, which is defined by the scope of the appended claims. Other aspects, advantages, and modifications are within the scope of the following claims.

The application's sequence listing, which the Patent Office published only in electronic form, follows.

SEQUENCE LISTING (638 sequences)

SEQ ID NO: 1 - DNA, 1311 bp, Arabidopsis thaliana
  misc_feature: Ceres Clone ID no. 29678
  misc_feature: Encodes the peptide sequence at SEQ ID NO. 2
aacatttataaagttctattagagacggtggataggccatggctactactgttcatctcagctcattctccctcttcatccaatccagaggaagaagagacaactccatatcttccgtcaagagtctcaaaaaacgcacaggtttgtctccctcttctgccctcacctcacaaggtggcagagacatgattccaccagagagaaaatgcaatgatcacaactctgcttttgatttcaagttgtatatgatccgcaaagccgaatctgtaaatgcggctctcgacgtttctgtaccgctccgagaacccctcactgtccaggaagccgtgcggtactcattgctagcgggcggaaaacgtgtgaggcctctgctctgcattgccgtctgcgagcttgtgggaggcgacgaggctactgccatgtcagctgcttgcgcggttgagatgatccacacaagctctcttattcatgacgatcttccgtgcatggacaatgccgacctccgcagaggcaagcccaccaaccacaaggtatatggagaagacatggcggttttggcaggtgatgcactccttgcattggcgtttgagcacatgacggttgtgtcgagtgggttggtcgctcccgagaggatgattcgcgcggtggttgagctggccagggccatagggactacagggctagttgctggacaaatgatagacctagccagcgaaagactgaatccagacaaggttggattggagcatctagagttcatccatctccacaaaacggcggcattgttggaggcagcggcggttttaggggttataatgggaggtggaacagaggaagagatcgaaaagcttagaaagtatgctaggtgtattggactactgtttcaggtggttgatgacattcccgacgtaacaaaatctactgaggaattgggaaagactgcaggaaaagacgtaatggctggaaagctgacgtatccaaggctgataggtttggagagatcaaaggaagttgcagaggaactgaggagagaagcagaggaacaacttctagggtttgatccaagtaaggcggcgcctctggtggctcttgctagctacatcgcttgcagacacaactgaatggactgatcatatcctcaatgcatctaatcttctaacaagtccttttacttagatctatggtcttgtttcttataaatcatctatgccgtgtgatcatctctctcagttgttttcaagttgtattatgtttttgaatcttaataatgtaatgttcgaaaaatatcaataagatttgctcataggaacg

SEQ ID NO: 2 - protein, 360 aa, Arabidopsis thaliana
  misc_feature (93)..(356): Pfam name: polyprenyl_synt Pfam desc: Polyprenyl synthetase
  misc_feature: Ceres Clone ID no. 29678
  misc_feature: in Figure 1
  misc_feature: Bit score of 661.7 for HMM based on sequences of Figure 1
MATTVHLSSFSLFIQSRGRRDNSISSVKSLKKRTGLSPSSALTSQGGRDMIPPERKCNDHNSAFDFKLYMIRKAESVNAALDVSVPLREPLTVQEAVRYSLLAGGKRVRPLLCIAVCELVGGDEATAMSAACAVEMIHTSSLIHDDLPCMDNADLRRGKPTNHKVYGEDMAVLAGDALLALAFEHMTVVSSGLVAPERMIRAVVELARAIGTTGLVAGQMIDLASERLNPDKVGLEHLEFIHLHKTAALLEAAAVLGVIMGGGTEEEIEKLRKYARCIGLLFQVVDDIPDVTKSTEELGKTAGKDVMAGKLTYPRLIGLERSKEVAEELRREAEEQLLGFDPSKAAPLVALASYIACRHN

SEQ ID NO: 3 - DNA, 1412 bp, Arabidopsis thaliana
  misc_feature: Ceres Clone ID no. 36701
  misc_feature: Encodes the peptide sequence at SEQ ID NO. 4
gttacttcctaggttctcactaatggccaatccaattctccattcataattttgactccactttccaaaacaaacaaaaaaaaataaatactaatataaaaaattctcaaatctaaaatttcagatttcagaaatcgccatggcttcagtgactctaggttcatggattgttgttcaccaccacaatcatcatcatccatcttcaatccttaccaaatccagatccagatcttgtcctataactcttactaaacccatctcctttcgatcaaaacgcaccgtttcatcatcttcttcaatcgtttcttcttccgttgttacaaaagaagacaatctacgccaatctgaaccatcctctttcgatttcatgtcgtacatcatcaccaaagccgaattagtcaacaaagctttagattcagctgttcctctccgtgagccactcaagatccacgaagcgatgcgttactctcttctcgccggtggcaaaagagttagaccagttctctgcatcgctgcttgtgaactcgtcggaggtgaagaatcaaccgctatgccagcagcttgcgccgtcgagatgattcacaccatgtcgttgatccacgacgatctcccttgtatggataacgacgatctccgccgtggaaaaccgaccaaccacaaagtgtttggtgaagacgtcgctgttttagccggagacgcgcttctctctttcgctttcgagcatttagcttcggcgacgagttctgatgttgtttctccggtgagagtggttcgagccgttggagaattggctaaagcgataggaacagaagggttagtggcgggtcaagtcgtggatattagtagtgaagggttagatttaaacgacgtcggtttagagcatttggagtttatccatttgcataaaacggcggcgttgcttgaagcttctgctgttttgagagctattgttggtggaggaagtgatgatgagattgagaggttaagaaagtttgcgagatgtattggtttgttgtttcaggtggttgatgatatcttgtatgtgacgaaatcgtcgaaagagttagggaaaactgctgggaaagatttgattgctgataagttgacgtatcctaagattatgggtttggagaaatcgagagagtttgctgagaaattgaatagagaggctcgtgatcagcttttagggtttgattctgataaggttgctcctttgttggctttggctaattacattgcctatagacagaactgatttgtgttcgattccttttgtcgggaatcattattagattggaattgtagaaatctcggacaggttctctagagtttgttggtgtaatcatctctatgttttcatgtactaaaaaatttggatagtaatggatgaaatatgaagaggttcatgtgcc

SEQ ID NO: 4 - protein, 371 aa, Arabidopsis thaliana
  misc_feature (103)..(367): Pfam name: polyprenyl_synt Pfam desc: Polyprenyl synthetase
  misc_feature: Ceres Clone ID no. 36701
  misc_feature: Bit score of 699.5 for HMM based on sequences of Figure 1
  misc_feature: Functional Homolog Of Ceres Clone ID no. 29678 at SEQ ID NO. 2
MASVTLGSWIVVHHHNHHHPSSILTKSRSRSCPITLTKPISFRSKRTVSSSSSIVSSSVVTKEDNLRQSEPSSFDFMSYIITKAELVNKALDSAVPLREPLKIHEAMRYSLLAGGKRVRPVLCIAACELVGGEESTAMPAACAVEMIHTMSLIHDDLPCMDNDDLRRGKPTNHKVFGEDVAVLAGDALLSFAFEHLASATSSDVVSPVRVVRAVGELAKAIGTEGLVAGQVVDISSEGLDLNDVGLEHLEFIHLHKTAALLEASAVLRAIVGGGSDDEIERLRKFARCIGLLFQVVDDILYVTKSSKELGKTAGKDLIADKLTYPKIMGLEKSREFAEKLNREARDQLLGFDSDKVAPLLALANYIAYRQN

SEQ ID NO: 5 - DNA, 1294 bp, Arabidopsis thaliana
  misc_feature: Ceres Clone ID no. 36311
  misc_feature: Encodes the peptide sequence at SEQ ID NO. 6
aatagaaattttgatttgattttgatgaaaaatggaaccacaaattctttttctctatctctcactcttcattctctccctaaacttcttcttcacgaatcttaaaccaaggctagtccgcctcttccagccttctttagaatctcgtgtcaagaccgctcttttatcccgaaaggaagtagccgcgtttcttgattctcccattgtcgaagacgaagaaggcgaagaaagagaagaggaagaagaaggaggtatcgtttcaaatgccaactttacgtttgagtttgatccatacatgatgagcaaagccgaatcagtgaacaaagctctagaagaagcaattccagtcggagagccactcaagattcatgaagccatgcgatacgcgattcttgcggctggaaaacgtgttaggccaatactctgccttgcttcttgcgagctagtaggtggccaagaaaatgcggcaatgcccgccgcttgtgcggttgagatgatccacacgatgtctctaatcaaagacgatttgccttgtatggacaacgacgatttgcgtcgtggaaagcccacgacgcacaaagtctacggtgaaggagttgccattctctctggtggggctctcttgtctcttgcctttgagcacatgaccaccgcggaaatatcctcggagagaatggtttgggcggtgagagaattggctaggtctattgggacaagaggtttagtcgcgggacaagcgatggatataagcagtgaaggtttggacttaaacgaggtcggattagagcatttggagtttatccatgttcataaaaccgcggttttgttggaaactgccgcggttcttggcgccataattggtggtggatctgatgaagagattgaaagtgtgagaaagtttgcaaggtgcattggattgttgtttcaggtggtggatgatattttggacgagacgaagtcgtcggaggaattgggaaaaaccgccgggaaagatcagctcgccggaaagctaacgtatccaaagttgatagggttggagaaatcgaaagaatttgttaagagattgacgaaagatgcacggcaacatcttcaagggtttagttctgaaaaggttgctcctttagtagctcttactacttttattgctaatagaaataagtgattatatatttgttttgtttgtgtgtgttgggtttatgtatacatgctaaagtagtgtgttcccttatttttaagtgtaaccacattttaagatgtttattaatgaatatttaaaaatgtacataatttttat

SEQ ID NO: 6 - protein, 376 aa, Arabidopsis thaliana
  misc_feature (112)..(372): Pfam name: polyprenyl_synt Pfam desc: Polyprenyl synthetase
  misc_feature: Ceres Clone ID no. 36311
  misc_feature: Bit score of 602.9 for HMM based on sequences of Figure 1
  misc_feature: Functional Homolog Of Ceres Clone ID no. 29678 at SEQ ID NO. 2
MEPQILFLYLSLFILSLNFFFTNLKPRLVRLFQPSLESRVKTALLSRKEVAAFLDSPIVEDEEGEEREEEEEGGIVSNANFTFEFDPYMMSKAESVNKALEEAIPVGEPLKIHEAMRYAILAAGKRVRPILCLASCELVGGQENAAMPAACAVEMIHTMSLIKDDLPCMDNDDLRRGKPTTHKVYGEGVAILSGGALLSLAFEHMTTAEISSERMVWAVRELARSIGTRGLVAGQAMDISSEGLDLNEVGLEHLEFIHVHKTAVLLETAAVLGAIIGGGSDEEIESVRKFARCIGLLFQVVDDILDETKSSEELGKTAGKDQLAGKLTYPKLIGLEKSKEFVKRLTKDARQHLQGFSSEKVAPLVALTTFIANRNK

SEQ ID NO: 7 - DNA, 1288 bp, Glycine max
  misc_feature: Ceres Clone ID no. 581754
  misc_feature: Encodes the peptide sequence at SEQ ID NO. 8
atataagaataacattagcaggcaaaggccttatctggcaccaaacatgagttctctgaatcttggaacatggcctcgtcccacctctatgttgaacacaccttcacatctccttcccccttttcacactctcactctcacaacaacgcttcccaaactcgcaagtggaaccccaaaactaatatcttcttttcccctcgtctctgctgtgcccactaaggaacacacagtcacaacccaggaaattcaactccaagacacgccgctcaacttcgatttcaagggctacatgatcgccaaggcccacacggtaaaccaagccttggacgccgccattgcgttgagggacccacacaagatccaccaagccatgcgctactccctcctcgccggcggcaagagggtccgccccgtgctctgcatcgccgcatgcgagctcgtcggtggcacagaggccaccgccatccccgccgcctgcgccgtcgagatgatccacaccatgtcgctcatccacgacgacctgccatgtatggacaacgacgacctccgccgcggaaagccgaccaaccacaaggtctacggcgaggacgtggcggtcctcgccggcgacgcgctcctcgccttcgcgttcgagcacgtggcagcgtccacggagggagtgtcgccgtcacgcgtggttcgagcgattggggaattagcgaagtcgatcggtacggaagggcttgtggcgggacaagtggtggatatagattcggagggggtggcgaatgtggggctggagacgctggaattcattcacgtgcacaaaacggcggcgttgctggaagctgcggttgtgttgggggcaatagtgggaggtgggagcgacgaggaggttgagaaattaaggaagttcgctaggtgcattgggttgttgtttcaggttgtggacgacattctggatgttacgaagtcgtcggaggaattggggaagacggcggggaaggatttggtggctgataaggttacttatcccaagctattggggatagataagtcaaaggaatttgctcaagaattgttaaaggatgccaaggaacaattgtctggcttcgatcctccaaaggcggctcccttgtttgcattaaccaattacattgcttataggcaaaattaaaagtgaaaacattggataccctgttttctcaccggggaaccactcaaataaatttctctgcttccatttccagtcctcaatgctgtactgttctccagcgattatttgtaataaaataaacctcttttttac

SEQ ID NO: 8 - protein, 369 aa, Glycine max
  misc_feature (105)..(365): Pfam name: polyprenyl_synt Pfam desc: Polyprenyl synthetase
  misc_feature: Ceres Clone ID no. 581754
  misc_feature: in Figure 1
  misc_feature: Bit score of 716.7 for HMM based on sequences of Figure 1
  misc_feature: Functional Homolog Of Ceres Clone ID no. 29678 at SEQ ID NO. 2
MSSLNLGTWPRPTSMLNTPSHLLPPFHTLTLTTTLPKLASGTPKLISSFPLVSAVPTKEHTVTTQEIQLQDTPLNFDFKGYMIAKAHTVNQALDAAIALRDPHKIHQAMRYSLLAGGKRVRPVLCIAACELVGGTEATAIPAACAVEMIHTMSLIHDDLPCMDNDDLRRGKPTNHKVYGEDVAVLAGDALLAFAFEHVAASTEGVSPSRVVRAIGELAKSIGTEGLVAGQVVDIDSEGVANVGLETLEFIHVHKTAALLEAAVVLGAIVGGGSDEEVEKLRKFARCIGLLFQVVDDILDVTKSSEELGKTAGKDLVADKVTYPKLLGIDKSKEFAQELLKDAKEQLSGFDPPKAAPLFALTNYIAYRQN

SEQ ID NO: 9 - protein, 391 aa, Ginkgo biloba
  misc_feature (126)..(387): Pfam name: polyprenyl_synt Pfam desc: Polyprenyl synthetase
  misc_feature: Public GI ID no. 34484306
  misc_feature: in Figure 1
  misc_feature: Bit score of 680.4 for HMM based on sequences of Figure 1
  misc_feature: Functional Homolog Of Ceres Clone ID no. 29678 at SEQ ID NO. 2
MAASAMTASYQSLHFCLQSKNMASPECILKSFSLPCSRFNGASTSLGASNGQYMGFRGHLRKGLLSSRGVMSSGSLNTVAQLVSEAETVKEKKDFEFDFKKYMYSKAISVNEALDKAVPTHYPEKIHESMRYSLLAGGKRVRPTLCIAACELVGGTEDLAMPAACAMEMIHTMTLIHDDLPCMDNDNLRRGKPTNHKAFGEDTAVLAGDALLSFAFEHIARSTSKTVESERVLRVICELGKSMGSEGLVAGQIVDIASEGDTSVDLKTLEYIHLHKTAVLLECSVVSGAIIGGASEEEIERTRRYARCVGLLFQVVDDILDVTKTSEELGKTAGKDLISDKATYPKLMGLEKAKEFAVELVNKAKEELSYFDPVKAAPLLGLADYIAFRQN

SEQ ID NO: 10 - DNA, 1624 bp, Gossypium hirsutum
  misc_feature: Ceres Clone ID no. 1894727
  misc_feature: Encodes the peptide sequence at SEQ ID NO. 11
acgtatactgctcatccacttcccccacttcccccacttccccccacatatccttcatttcccagatctgtgccactttttacttctttttattattattcgttttatgctattttccaatgtcccaactccccatacccattgcttgacttcatgatcggtttttgtgttttcatagtggaatttgcattgcaaagattttggtttttttagctttcattgtaattagcttgtttttgcttctacatcaaacaaagatcccatcttttaaatacccaaagagaggaaaagaaaaatatggcttcggtgaatctgtgttcttgggttcaatcttactccattttcaaccaagcttctagatccaaatattctcttttgcccagatcccttccattcaaccccctcatgaatctgtcatcttcaacctccaaaacacgcggctttgcatctattccttcaatttgctcggtcattaccaaaggagacgcggtcaaggaagaagaagaacaacagcagcctcaaaacccaagctttgatttcaaaacttacatggttcaaaaggccactatgattaaccaagccctggactctgctgtttcactccgtgaacctgttaaaatccatgaagcaatgcgttactctcttttggcaggtggcaaaagggtacgaccggtgctttgtttagctgcttgtgagcttgttggtggccaagaatccatggctatgccagcagcttgtgctgttgaaatgattcatactatgtctttaatccacgatgatcttccttgcatggacaacgatgatcttcggagagggaaaccaactaatcacaaagtttttggtgaggatatcgctgtcttagctggggatgctcttttagcttttgcttttgaacatgtagctgtttctacagttggtgttacgcctggtaggattgtaagggcaattggagaattagctaaatctattggggctgaagggttggtggctggtcaagttgtggatataaatagtgagggactaacagatgtggggttggatcatttagaattcattcatgttcataaaactgctgctttgcttgaagctgctgtagttttgggggcaattcttggaggtggatgtgatgaagatgtggaaaggttgaggaaatttgcaaggtatattgggcttttgtttcaggttgtggatgacattctcgatgtgacaaaatcatctaaggaattagggaagactgcaggaaaagatttgttggctgataaagtcacttatccaaagttgattggaatagagaagtcaaaggagtttgcagagaaattgagaagtgattcattagagttgctccaaggatttgattctgagaaagctgcccctttgattgctttggctaattacatagcttacaggcaaaactaactcttttgtttttgttggtgtataattcttattcttgttggtttagatgaggttgaattgtctaaaacatttgtttagacgaaaaggccttgatttgatgcttcttgttatgtttgatacaaaaggctttgtgaaagaagcaggagaaatagttctaatgttggatatattcttctacgaggatgataatgatagaatttcgtttttc

SEQ ID NO: 11 - protein, 372 aa, Gossypium hirsutum
  misc_feature (108)..(368): Pfam name: polyprenyl_synt Pfam desc: Polyprenyl synthetase
  misc_feature: Ceres Clone ID no. 1894727
  misc_feature: in Figure 1
  misc_feature: Bit score of 719.1 for HMM based on sequences of Figure 1
  misc_feature: Functional Homolog Of Ceres Clone ID no. 29678 at SEQ ID NO. 2
MASVNLCSWVQSYSIFNQASRSKYSLLPRSLPFNPLMNLSSSTSKTRGFASIPSICSVITKGDAVKEEEEQQQPQNPSFDFKTYMVQKATMINQALDSAVSLREPVKIHEAMRYSLLAGGKRVRPVLCLAACELVGGQESMAMPAACAVEMIHTMSLIHDDLPCMDNDDLRRGKPTNHKVFGEDIAVLAGDALLAFAFEHVAVSTVGVTPGRIVRAIGELAKSIGAEGLVAGQVVDINSEGLTDVGLDHLEFIHVHKTAALLEAAVVLGAILGGGCDEDVERLRKFARYIGLLFQVVDDILDVTKSSKELGKTAGKDLLADKVTYPKLIGIEKSKEFAEKLRSDSLELLQGFDSEKAAPLIALANYIAYRQN

SEQ ID NO: 12 - DNA, 1101 bp, Populus balsamifera subsp. trichocarpa
  misc_feature: Ceres Annot ID no. 1487885
  misc_feature: Encodes the peptide sequence at SEQ ID NO. 13
atgacttctgtgaatctgggtccatgggttcagataacttcaatcatcaacaaaaaaacaagatccagatccagacccatgtcaaacttcttgtccccgggccttaaaacccttcaaatcgcttcaacacatcaaagacagagaaaacccatgtcttcaatttgcgcagttcttacagaagaagagactcttcaagaagatcaacacaaacccacttttgatttcaagtcttatatgatacagaaagccaattctgttaacaaagcattagatactgctgttactcttaaagaaccggctaaaatccatgagtctatgcgttactctcttttggctggtggcaagagggttcggccagtgctttgtctagctgcatgtgagcttgttggtgggtctgaatccatggctatgcctgctgcttgtgctgtagaaatgatccatactatgtcattaatacatgatgatcttccttgcatggataatgatgatcttcgccgcggaaaatccaccaatcatattgtttttggtgaggatgttgcggttttggcaggggatgctttactggcatttgcatttgaacatattgcagtgtctacactcaatgtttcgcctcttagaattgttcgtgcagttggtgaattggcgaaagtgattggtgctgaaggacttgttgctggacaagttgtggatatttgttctgaagggttgtccgaagtggggttagaacagcttgaatttattcatattcataagactgctaagttgttggaaggtgcggttgttttaggggctatattaggtggagggaccgatgaggaagttgagaaattgaggcgatacgcgaggagtattggattgttgtttcaagtagtggatgatattcttgatgttaccaaatcttcacaagaattggggaaaactgcagggaaagatttggttgcggataaagttacttatcctaagttaatgggaattgagaagtctagggagtttgctgagaagttgcttaacgaagctagggagttgcttgctggatttgatcaagagaaggcggctccgttgattgctttggctaattacattgcttacaggcaaaactaa

SEQ ID NO: 13 - protein, 316 aa, Populus balsamifera subsp. trichocarpa
  misc_feature (52)..(312): Pfam name: polyprenyl_synt Pfam desc: Polyprenyl synthetase
  misc_feature: Ceres Annot ID no. 1487885
  misc_feature: in Figure 1
  misc_feature: Bit score of 721.9 for HMM based on sequences of Figure 1
  misc_feature: Functional Homolog Of Ceres Clone ID no. 29678 at SEQ ID NO. 2
MSSICAVLTEEETLQEDQHKPTFDFKSYMIQKANSVNKALDTAVTLKEPAKIHESMRYSLLAGGKRVRPVLCLAACELVGGSESMAMPAACAVEMIHTMSLIHDDLPCMDNDDLRRGKSTNHIVFGEDVAVLAGDALLAFAFEHIAVSTLNVSPLRIVRAVGELAKVIGAEGLVAGQVVDICSEGLSEVGLEQLEFIHIHKTAKLLEGAVVLGAILGGGTDEEVEKLRRYARSIGLLFQVVDDILDVTKSSQELGKTAGKDLVADKVTYPKLMGIEKSREFAEKLLNEARELLAGFDQEKAAPLIALANYIAYRQN

SEQ ID NO: 14 - protein, 366 aa, Sinapis alba
  misc_feature (99)..(362): Pfam name: polyprenyl_synt Pfam desc: Polyprenyl synthetase
  misc_feature: Public GI ID no. 13431547
  misc_feature: in Figure 1
  misc_feature: Bit score of 714.3 for HMM based on sequences of Figure 1
  misc_feature: Functional Homolog Of Ceres Clone ID no. 29678 at SEQ ID NO. 2
MASSVTPLGSWVLLHHHPSTILTQSRSRSPPSLITLKPISLTPKRTVSSSSSSSLITKEDNNLKSSSSSFDFMSYIIRKADSVNKALDSAVPLREPLKIHEAMRYSLLAGGKRVRPVLCIAACELVGGEESLAMPARCAVEMIHTMSLIHDDLPCMDNDDLRRGKPTNHKVYGEDVAVLAGDALLSFAFEHLASATSSEVSPARVVRAVGELAKAIGTEGLVAGQVVDISSEGLDLNNVGLEHLKFIHLHKTAALLEASAVLGGIIGGGSDEEIERLRKFARCIGLLFQVVDDILDVTKSSQELGKTAGKDLIADKLTYPKLMGLEKSREFAEKLNTEARDQLLGFDSDKVAPLLALANYIANRQN

SEQ ID NO: 15 - protein, 370 aa, Hevea brasiliensis
  misc_feature (106)..(366): Pfam name: polyprenyl_synt Pfam desc: Polyprenyl synthetase
  misc_feature: Public GI ID no. 75250205
  misc_feature: in Figure 1
  misc_feature: Bit score of 723.8 for HMM based on sequences of Figure 1
  misc_feature: Functional Homolog Of Ceres Clone ID no. 29678 at SEQ ID NO. 2
MSSVNLGSWVHTSYVLNQATRSRSKSKSFSLPFNPLKSLAISFAYRKSERPISSVSAIITKEEETLQEEQNNPPPSFDFKSYMLQKGNSINQALEAAIPLQEPAKIHESMRYSLLAGGKRVRPALCLAACELVGGNDSMAMPAACAVEMIHTMSLIHDDLPCMDNDDLRRGKPTNHIVFGEDVAVLAGDALLAFAFEHIAVSTLNVSSARIVRAVGELAKAIGAEGLVAGQVVDINSEGSSEVDLEKLEFIHIHKTAKLLEGAVVLGAILGGGTDEEVEKLRKYARDIGLLFQVVDDILDVTKSSQELGKTAGKDLVADKVTYPKLLGIEKSREFAEKLNKEAQEQLAGFDPEKAAPLIALANYIAHRQN

SEQ ID NO: 16 - protein, 363 aa, Solanum lycopersicum
  misc_feature (99)..(359): Pfam name: polyprenyl_synt Pfam desc: Polyprenyl synthetase
  misc_feature: Public GI ID no. 82547882
  misc_feature: in Figure 1
  misc_feature: Bit score of 683.1 for HMM based on sequences of Figure 1
  misc_feature: Functional Homolog Of Ceres Clone ID no. 29678 at SEQ ID NO. 2
MRSMNLVDSWGQACLVINQSLPYNSFNGLMKINSKNRKILKQSLSYRTFSSLTVSAIATNEKVVMEKEEFNFKVYVAEKAICVNKALDEAIMVKDPPKIHEAMRYSLLAGGKRVRPMLCLAACELVGGNQGNAMAAACAVEMIHTMSLIHDDLPCMDDDDLRRGKPTNHKVYGEDVAVLAGDALLAFAFEYLATATTGVPPSRILVAVAELAKSVGTEGLVAGQVADLACTGNPNVGLEMLEFIHIHKTAALLEASVVIGAILGGGADEEVDKLRRFAQCIGLLFQVVDDILDVTKSSSELGKTAGKDLAVDKTTYPKLLGLEKAKEFAAELNGEAKQQLAAFDSHKAAPLIALADYIANRQN

SEQ ID NO: 17 - protein, 372 aa, Antirrhinum majus
  misc_feature (108)..(368): Pfam name: polyprenyl_synt Pfam desc: Polyprenyl synthetase
  misc_feature: Public GI ID no. 46241274
  misc_feature: in Figure 1
  misc_feature: Bit score of 727.1 for HMM based on sequences of Figure 1
  misc_feature: Functional Homolog Of Ceres Clone ID no. 29678 at SEQ ID NO. 2
MSLVNPITTWSTTTTSKSPKNVQTTTRSRSIILPHKISLFPSNPKSKSKTHLRFSISSILTKNPQESSQKTSKDPTFTLDFKTYMLEKASSVNKALEQAVLLKEPLKIHESMRYSLLAGGKRVRPMLCIAACELVGGLESTAMPSACAVEMIHTMSLIHDDLPCMDNDDLRRGKPTNHKIYGEDVAVLAGDALLAFSFEHVAKSTKGVSSDRIVRVIGELAKCIGSEGLVAGQVVDISSEGMTEVGLEHLEFIHVHKTAALLEASVVLGAIVGGADDEDVEKLRKFARCIGLLFQVVDDILDVTKSSQELGKTAGKDLVADKTTYPKLLGIEKSREFAEKLNREAQEQLEGFDSVKAAPLIALANYIAYRDN

SEQ ID NO: 18 - DNA, 1110 bp, Sorghum bicolor
  misc_feature: Ceres Annot ID no. 6023904
  misc_feature: Encodes the peptide sequence at SEQ ID NO. 19
atggccttccacttccacccgctggccgccacgcgcgtccacctctccccactcccgttcgccgccgccgccgccgcgggggcgccctccccctcgtcctcctccgtcgccatcgcggcgccccaccaccaccacggccgccgccgcttctccgccgtcgtggccacggcggccgcctccgcggcggccaccacggagttcgacttcaaggcgtacatgggggagcgcgcggtcgcggtgaaccgtgcgctggacgcggccatccccgccggggaaccccccgccgcgctgcacgacgcgatgcggtacgcgctgctggcgggcgggaagcgcgtgcgcccggcgctgtgcctggccgcgtgcgccgtggtgggtgggcccgaggcctgggcgatgcccgccgccgcggccgtcgagatggtgcacaccatgtcgctcgtccacgacgacctcccctgcatggacgacgacgacctccgccgcggcaagcccacctgccacgtcgtctacggcgagcccatcgcggtcctcgccggggacgcgctgctctcgctctccttccaccacatggccagcgtcgggtcctaccctccggacgtagacccggagaagcatcccgcccgcgtcgtccgagccattggcgagctcgcgcgctgcatcggatcggagggactcgtcgccggccaggttgtcgatcttgagatgacgggcacatctgaacctgtgccccttgaacgccttgagtacatccatctccacaagactgccgcattgcttgaggcctcagtggtgattggggcaatcattggaggcggcacggatgagcaaattgagcggctgcgaaaatatgcgaggtcaatcgggctgctgttccaggtggtcgatgacattcttgatgtcaccaagtcgtcagaggagctcggcaagacggcagggaaggacttggcaagtgacaagacgacgtacccaaagctattggggttagaaaagtcacgcgagtttgcagaaaagttgctttctgatgcaatagagcagcttgattgtttcgacaaggagaaggcagcacctctgttgcatttggccaactatatcgcccataggcagaactga

SEQ ID NO: 19 - protein, 369 aa, Sorghum bicolor
  misc_feature (97)..(365): Pfam name: polyprenyl_synt Pfam desc: Polyprenyl synthetase
  misc_feature: Ceres Annot ID no. 6023904
  misc_feature: in Figure 1
  misc_feature: Bit score of 686.2 for HMM based on sequences of Figure 1
  misc_feature: Functional Homolog Of Ceres Clone ID no. 29678 at SEQ ID NO. 2
MAFHFHPLAATRVHLSPLPFAAAAAAGAPSPSSSSVAIAAPHHHHGRRRFSAVVATAAASAAATTEFDFKAYMGERAVAVNRALDAAIPAGEPPAALHDAMRYALLAGGKRVRPALCLAACAVVGGPEAWAMPAAAAVEMVHTMSLVHDDLPCMDDDDLRRGKPTCHVVYGEPIAVLAGDALLSLSFHHMASVGSYPPDVDPEKHPARVVRAIGELARCIGSEGLVAGQVVDLEMTGTSEPVPLERLEYIHLHKTAALLEASVVIGAIIGGGTDEQIERLRKYARSIGLLFQVVDDILDVTKSSEELGKTAGKDLASDKTTYPKLLGLEKSREFAEKLLSDAIEQLDCFDKEKAAPLLHLANYIAHRQN

SEQ ID NO: 20 - DNA, 1389 bp, Triticum aestivum
  misc_feature: Ceres Clone ID no. 753701
  misc_feature: Encodes the peptide sequence at SEQ ID NO. 21
atcctctccgcccactccaccccgcactgaaaaaaccccgagagccatggcagcgttccaccccctggtcgcctcgcgcgtccgcctcgccaccccgctcctccccgccgccgcgcccgccgccgccgcggccggggtctccttccaccgccgccgcttctccgccatcgtcgccgcggcgaccgcccccgcggccaccgggttcgacttcaactcctacatgggggagcgggcggtggccgtgaacagcgccctggacgccgccgtcccggccggcgagccccccgcggcgctccacgacgcgatgcgctacgcgctgctggccgggggcaagcgcgtgcgcccggccctctgcctggccgcctgcgtcgtgtccggcggccgcgaggcctgggcgatggcccccgccgccgcggtcgagatggtgcacaccatgtcgctcgtgcacgacgacctcccctgcatggacgacgacgacctccgccgcggcaaggccacctgccacgtcgtgtacggcgagcccatcgccgtgctcgccggcgacgccctgctcgcgctcgccttcgagcacatggccagcctcgactcctaccccccggacgtcgaccccgccaagcacaccgcccgcgtcgtccgcgccattggtgagctcgcgcgctgcatcggatcagagggcctcgtcgccggccaggttgttgatctggagatgactggctcaaccgagactgtaccacttgaccgccttgagtacatccatctgcacaagactgctgccttgcttgaggcctcagtggttattggagcaatcatcgggggtggctcggaagagcagattgagcggttgcgcaagtacgcgagatcaattgggttgctgttccaggtggttgatgacattcttgatgtgaccaagtcatcagaggagctagggaagacagctgggaaggacttggcgagtgacaagacgacatacccaaagttactagggttggagaagtcacgggaatttgcggagaagttgctttctgatgcaaaggagcaacttgctgattttgatgaagagaaggcagcaccgctattgtacttggccaattatattgcctatcggcagaactaaggtgatggttattctgttgtttgttgttgatctgtaactttgtaagaacatcaagtctgggatttgaggaatatctgaattcttcccctcatatatactagtttagttttctaccattgtgtcatgagaatatttaggtgacaaaagccacatgagttaggtggcaaataccaatgtcccattgagatagccaagactttataatgggaatcagcctttatgtcctatactgtctggatgataataaatcaattgatttcgaaagaataacattc

SEQ ID NO: 21 - protein, 355 aa, Triticum aestivum
  misc_feature (83)..(351): Pfam name: polyprenyl_synt Pfam desc: Polyprenyl synthetase
  misc_feature: Ceres Clone ID no. 753701
  misc_feature: in Figure 1
  misc_feature: Bit score of 675.1 for HMM based on sequences of Figure 1
  misc_feature: Functional Homolog Of Ceres Clone ID no. 29678 at SEQ ID NO. 2
MAAFHPLVASRVRLATPLLPAAAPAAAAAGVSFHRRRFSAIVAAATAPAATGFDFNSYMGERAVAVNSALDAAVPAGEPPAALHDAMRYALLAGGKRVRPALCLAACVVSGGREAWAMAPAAAVEMVHTMSLVHDDLPCMDDDDLRRGKATCHVVYGEPIAVLAGDALLALAFEHMASLDSYPPDVDPAKHTARVVRAIGELARCIGSEGLVAGQVVDLEMTGSTETVPLDRLEYIHLHKTAALLEASVVIGAIIGGGSEEQIERLRKYARSIGLLFQVVDDILDVTKSSEELGKTAGKDLASDKTTYPKLLGLEKSREFAEKLLSDAKEQLADFDEEKAAPLLYLANYIAYRQN

SEQ ID NO: 22 - protein, 368 aa, Vitis vinifera
  misc_feature (104)..(364): Pfam name: polyprenyl_synt Pfam desc: Polyprenyl synthetase
  misc_feature: Public GI ID no. 157348194
  misc_feature: in Figure 1
  misc_feature: Bit score of 722.0 for HMM based on sequences of Figure 1
  misc_feature: Functional Homolog Of Ceres Clone ID no. 29678 at SEQ ID NO. 2
MNTVNLGTWVHTSYVFNHGGRLKSPVLSRMLHPLKNPSFPMLSQRSGRPMSLVAVLTKEEMVRGGDTPEEEKPAFNFNAYILDKANSVNKALDDAVPIREPVKVHESMRYSLLAGGKRVRPVLCIAACELVGGDEATAMPAACAVEMIHTMSLMHDDLPCMDNDDLRRGKPTNHKVFGENVAILAGDALLAFAFEHMATATVGVPPGWIVRAVGELAKSIGSEGLVAGQVVDICSEGLKDVGLEHLEYIHVHKTAALLEGAVVLGAILGGGSNEEIEKLRKFARCIGLLFQVVDDILDVTKSSQELGKTAGKDLVADKLTYPKLLGIEKSRELAEQLNKDAKDQLSGFDPDKAAPLIALSNYIAYRQN

SEQ ID NO: 23 - protein, 377 aa, Mentha x piperita
  misc_feature (113)..(373): Pfam name: polyprenyl_synt Pfam desc: Polyprenyl synthetase
  misc_feature: Public GI ID no. 6449052
  misc_feature: in Figure 1
  misc_feature: Bit score of 704.5 for HMM based on sequences of Figure 1
  misc_feature: Functional Homolog Of Ceres Clone ID no. 29678 at SEQ ID NO. 2
MSALVNPVAKWPQTIGVKDVHGGRRRRSRSTLFQSHPLRTEMPFSLYFSSPLKAPATFSVSAVYTKEGSEIRDKDPAPSTSPAFDFDGYMLRKAKSVNKALEAAVQMKEPLKIHESMRYSLLAGGKRVRPMLCIAACELVGGDESTAMPAACAVEMIHTMSLMHDDLPCMDNDDLRRGKPTNHMAFGESVAVLAGDALLSFAFEHVAAATKGAPPERIVRVLGELAVSIGSEGLVAGQVVDVCSEGMAEVGLDHLEFIHHHKTAALLQGSVVLGAILGGGKEEEVAKLRKFANCIGLLFQVVDDILDVTKSSKELGKTAGKDLVADKTTYPKLIGVEKSKEFADRLNREAQEQLLHFHPHRAAPLIALANYIAYRDN

SEQ ID NO: 24 - DNA, 1311 bp, Panicum virgatum
  misc_feature: Ceres Clone ID no. 1811354
  misc_feature: Encodes the peptide sequence at SEQ ID NO. 25
aatctccacttaaccccatcgccgcccgaagccgttcgccactcgccgccaatggccatggccttccacacccttgccgcctcgcgcgtccgcgtcggccccctcctccccgccgccgccgcggcgcccatgtcctcctccgtcgcggcgcaccgctaccaccaccggcgccgcttctccgccatcgtggccgcggcgcccgcggcggcgcccgccgcggcgccggcggagttcgacttcgactcctacatgacggaacgctcggagacggtcaaccgcgccctggacgcggcaatccccgagggggagccccccgcggcgctgcacgaggcgatgcggtactcgctgctggcgggcggcaagcgggtgcgccccgcgctgtgcctcgccgcgtgcggcgtcgtgggcgggcgggaggagtgggcgctggcccccgccgccgcggtcgagatggtgcacaccatgtcgctcgtccacgacgacctgccctgcatggacgacgacgacctccgccgcggcaagcccacctgccacatcgtctacggcgaggccatcgcggtcctcaccggggacgcgctgctctcgcaagccttccaccacgtagccaacgccggctcctacccgccggacgtcgactcggagaagcaccccgcccgcgtcgtccgcgccactttcgagctcgcgcgctgcatcggctcagagggcctcgtcgccggccaggttgtggatcttgccatgactggcgcatctgaagttgtgccccttgaacgcctggagtacatccacctccacaagactgctgcattgcttgaggcctcagtggtcatgggggcaatcatcggcgggggcacggatgagcaaattgagcggctgcggaagtacgcgaggtcaataggtcttctgttccaggtggtcgacgacatacttgacgtgaccaaatcgtcggaggaattagggaagacagcagggaaggatttggcaagcgacaagactacatacccgaagttgttggggctagagaagtcacgggagtttgcagaaaagttgctttctgatgcaaaggagcagcttgctggttttgacaaagaaaaggcagcacctctgttgcatttggcctactatatcgcccacaggcagaactgaggtgatgcttactctgttgttgttcttgttgatctgtaactttgtaagctcattgtacttgggtttcagaaatatccgaatcatcatgtgatgtatactagctgtagctttctaccttgctgtaagaaggctattcagttgaaaatatgaatatcaaatcaaattagt

SEQ ID NO: 25 - protein, 363 aa, Panicum virgatum
  misc_feature (91)..(359): Pfam name: polyprenyl_synt Pfam desc: Polyprenyl synthetase
  misc_feature: Ceres Clone ID no. 1811354
  misc_feature: in Figure 1
  misc_feature: Bit score of 673.7 for HMM based on sequences of Figure 1
  misc_feature: Functional Homolog Of Ceres Clone ID no. 29678 at SEQ ID NO. 2
MAMAFHTLAASRVRVGPLLPAAAAAPMSSSVAAHRYHHRRRFSAIVAAAPAAAPAAAPAEFDFDSYMTERSETVNRALDAAIPEGEPPAALHEAMRYSLLAGGKRVRPALCLAACGVVGGREEWALAPAAAVEMVHTMSLVHDDLPCMDDDDLRRGKPTCHIVYGEAIAVLTGDALLSQAFHHVANAGSYPPDVDSEKHPARVVRATFELARCIGSEGLVAGQVVDLAMTGASEVVPLERLEYIHLHKTAALLEASVVMGAIIGGGTDEQIERLRKYARSIGLLFQVVDDILDVTKSSEELGKTAGKDLASDKTTYPKLLGLEKSREFAEKLLSDAKEQLAGFDKEKAAPLLHLAYYIAHRQN

SEQ ID NO: 26 - protein, 366 aa, Oryza sativa subsp. japonica
  misc_feature (94)..(362): Pfam name: polyprenyl_synt Pfam desc: Polyprenyl synthetase
  misc_feature: Public GI ID no. 115473007
  misc_feature: in Figure 1
  misc_feature: Bit score of 680.3 for HMM based on sequences of Figure 1
  misc_feature: Functional Homolog Of Ceres Clone ID no. 29678 at SEQ ID NO. 2
MAAFPPLAASRVRISPLIPAAAMAGTAGAAAASYAQHRRRFCAIVATAAASPVPAAAAAAATGFDFNAYMGEKAAAVNRALDASIPADEPPAALHEAMRYALLAGGKRVRPALCLAACAVVGGREAWAMPAAAAVEMVHTMSLVHDDLPCMDDDDLRRGKPTCHVVYGEPIAVLTGDALLSLSFHHMARFDSYPPDIDADKHPARVVRAIGELARCIGSEGLVAGQVVDLEMTGSTETVPLERLEYIHLHKTAALLEASVVIGAILGGGSDEQIESLRMYARSIGLLFQVVDDILDVTKSSEELGKTAGKDLASDKTTYPKLLGLEKSREFAEKLLSDAREQLSGFDQETAAPLLHLANYIAYRQN

SEQ ID NO: 27 - DNA, 1116 bp, Gossypium hirsutum
  misc_feature: Ceres Clone ID no. 1856050
  misc_feature: Encodes the peptide sequence at SEQ ID NO. 28
actggaaaaaggaaaaagagagagagaaaggatggttttctcaacggtgttaacatcagttccaaatctctaccttaccaggaaacccaaggatattcacatcccaattcgatgccaatcgtcaccttctgtatcaatttcaagtcaatcaaatttgacccaattcgatttaaaggcttactgggctaccctttatgcagaaatcactcaaaagcttgaagaagcaatcccagtgaaatacccagatcagatctatgaagctatgaggtactctgttcttgcaaagggtgctaagcgagcccctcctgttatgtgtgtggctgcctatgaaatctttggggataatcgactcgctgcttttcctactgcttgtgctcttgaaatggttcatgctgcttcattaattcatgatgaccttccttgcatggatgatgctccagaacgcagaggccaaccttcgaaccataaggtctttggtgatgacatggcgatccttgctggtgatgcactcttccctcttggcttccaccatattgtcatgcatacgcctcctgaacttgttcctgaatcccggctcttgcatgtgattgctgagatagcacgcactgtggggtcttctggcatggctgctgggcagttcctagacctcaaaggcggcaacactgttgattttatccaagagaaaaaatacggtgcaatgggtgaatgctctgcagtgtgtgggggattgttggccggtgccagagatgacgagatagaaaggttgaggaggtacgggagagctgtgggtgtattgtatgaagtggtgaatgatgttttgctgtcaaaattgacagaaaaagaaggaaccgaggggcaggaaaagaaaggtaaaggttatgtgagcttgtatgggatcgagaagtcaatggagattatagaagagcttcgaagcaaggctaagaacgaattggatcgctttgaaaagtatggtgactgtgtggtgccactctatagcttcatagattatgctattaatagaggtttcaatgttagtgacttgagtcaatgatgtgcttttttttcatgttggtgaatttacattgacgattgctagttattgacccggttaacatc

SEQ ID NO: 28 - protein, 339 aa, Gossypium hirsutum
  misc_feature (74)..(328): Pfam name: polyprenyl_synt Pfam desc: Polyprenyl synthetase
  misc_feature: Ceres Clone ID no. 1856050
  misc_feature: Bit score of 292.0 for HMM based on sequences of Figure 1
  misc_feature: Functional Homolog Of Ceres Clone ID no. 29678 at SEQ ID NO. 2
MVFSTVLTSVPNLYLTRKPKDIHIPIRCQSSPSVSISSQSNLTQFDLKAYWATLYAEITQKLEEAIPVKYPDQIYEAMRYSVLAKGAKRAPPVMCVAAYEIFGDNRLAAFPTACALEMVHAASLIHDDLPCMDDAPERRGQPSNHKVFGDDMAILAGDALFPLGFHHIVMHTPPELVPESRLLHVIAEIARTVGSSGMAAGQFLDLKGGNTVDFIQEKKYGAMGECSAVCGGLLAGARDDEIERLRRYGRAVGVLYEVVNDVLLSKLTEKEGTEGQEKKGKGYVSLYGIEKSMEIIEELRSKAKNELDRFEKYGDCVVPLYSFIDYAINRGFNVSDLSQ

SEQ ID NO: 29 - DNA, 1098 bp, Populus balsamifera subsp. trichocarpa
  misc_feature: Ceres Annot ID no. 1457156
  misc_feature: Encodes the peptide sequence at SEQ ID NO. 30
atgacttctgtgaatctgggttcatggtttcagacatcaatcatcaacaaagatacaggacccagatccatacccatctcaaattttttatctccaggttctaaaagtcttcaaattccttcagtacatcaaaaacagagaaaacccatgtcttcaatttgtgcggttctcgcaaaagaagagactcttcaagaagatcaacgaaaacccacttttgatttcaagtcttacatgctacaaaaagccaattctgttaacaaagcattagatgctgctgtttctcttaaagagccggctaaaatccatgagtctatgcgatactctcttttggctggtggcaagagggttaggccagtgctttgtctcgctgcgtgtgaccttgttggtgggtctgaatccatggctttgcctgctgcttgtgccgtagaaatgatccatactatgtcattaatgcatgatgatcttccttgcatggataacgatgatcttcgccgtggaaaacccaccaatcatattgtttttggtgaggatgttgcggttttggcaggggatgctttactgtcatttgcatttgaacatattgcagtgtctacaatccatgtttcgcctcttagaattgttcgtgcaattggtgaattggcgaaagctattggtgctgaaggacttgtcgccgggcaagttgttgatatttgttctgaagggttgtccgaagtggggttggagcagcttgaatttattcatgtacataagactgcgaagttgttggaaggtgctgttgttctaggggccatattaggtggaggaaccgatgaggaagttgagaaattgaggacctatgcaagaagtattggattattgtttcaagtagtggatgatattcttgatgttaccaaatcttcacaagaattggggaaaactgcagggaaggatttggttgcggataaggttacttatcctaggttaatgggaattgagaagtctcgggagtttgctgagaggttgctgaacgaagccaaggacatgcttgctggatttaatcaagagaaggccgctccgttgatagctttggctaattacattgcttacaggcaaaactaa

SEQ ID NO: 30 - protein, 365 aa, Populus balsamifera subsp. trichocarpa
  misc_feature (101)..(361): Pfam name: polyprenyl_synt Pfam desc: Polyprenyl synthetase
  misc_feature: Ceres Annot ID no. 1457156
  misc_feature: Bit score of 711.1 for HMM based on sequences of Figure 1
  misc_feature: Functional Homolog Of Ceres Clone ID no. 29678 at SEQ ID NO. 2
MTSVNLGSWFQTSIINKDTGPRSIPISNFLSPGSKSLQIPSVHQKQRKPMSSICAVLAKEETLQEDQRKPTFDFKSYMLQKANSVNKALDAAVSLKEPAKIHESMRYSLLAGGKRVRPVLCLAACDLVGGSESMALPAACAVEMIHTMSLMHDDLPCMDNDDLRRGKPTNHIVFGEDVAVLAGDALLSFAFEHIAVSTIHVSPLRIVRAIGELAKAIGAEGLVAGQVVDICSEGLSEVGLEQLEFIHVHKTAKLLEGAVVLGAILGGGTDEEVEKLRTYARSIGLLFQVVDDILDVTKSSQELGKTAGKDLVADKVTYPRLMGIEKSREFAERLLNEAKDMLAGFNQEKAAPLIALANYIAYRQN

SEQ ID NO: 31 - DNA, 1098 bp, Populus balsamifera subsp. trichocarpa
  misc_feature: Ceres Annot ID no. 1449371
  misc_feature: Encodes the peptide sequence at SEQ ID NO. 32
atggccttctctacaacaatctctttctatgacaattcgcttctcctcaaaaaacccatcaatggcctcataaacaaccagccgagaaccccattaggccacctcaaatttgcgcccttgaaaattcaagccacctatgttgcaagcccatctttcaaacagtcatttcaatcccaagaagtgggcaacaagtcacagaaggtctcttttccagcattcgaatttaaggagtacatgatcaacaaggcaaatcaagtgaacaaagcactagatgaggcagtacccttgcaacatccccagaaaatcaatgaagccatgagatattctctgctcgcgggtggaaagcgtgtacgtccaattttatgcattgcttcgtgtgaattagtgggaggagatgaggggttagcaatgccagcggcttgtgcactggagatgatccacaccatgtcattaatccatgatgatcttccctgtatggacaacgatgatctccgacgaggtaagcccacaagtcataaaatattcggcgaagatactgcagttcttgctggcgatgcactcctatcacttgcctttgagcacgtagctaggaacaccaagaatgtttcatcggaccgtgtggtccaagccattgctgagcttggatcaacagttggatcaaaaggtcttgtggcaggtcagattgtggacattgacagtgaaggtaaagaagtgagtttgagcacattggagtatattcatgtccataaaacagcaaagctcttagaggcagcggttgtttgtggggcgataatgggaggtgcagatgctacaagtgtcgaaagacttaggaaatatgctaggtctatcgggttgctgtttcaggtggtggatgatatactggatgtgaccaagtcctcagaggaactggggaagacagccggaaaggatctggcgagtgacaaggcgacctaccccaagctgatgggcatagacgaggccaagaaatttgctgcccaattggtcgatgaagccaatcaaggtcttgctttcttcgatcatgtcaaggctgccccattataccattttgctaactatattgctactcgacaaaattaa

SEQ ID NO: 32 - protein, 365 aa, Populus balsamifera subsp. trichocarpa
  misc_feature (102)..(361): Pfam name: polyprenyl_synt Pfam desc: Polyprenyl synthetase
  misc_feature: Ceres Annot ID no. 1449371
  misc_feature: Bit score of 627.8 for HMM based on sequences of Figure 1
  misc_feature: Functional Homolog Of Ceres Clone ID no. 29678 at SEQ ID NO. 2
MAFSTTISFYDNSLLLKKPINGLINNQPRTPLGHLKFAPLKIQATYVASPSFKQSFQSQEVGNKSQKVSFPAFEFKEYMINKANQVNKALDEAVPLQHPQKINEAMRYSLLAGGKRVRPILCIASCELVGGDEGLAMPAACALEMIHTMSLIHDDLPCMDNDDLRRGKPTSHKIFGEDTAVLAGDALLSLAFEHVARNTKNVSSDRVVQAIAELGSTVGSKGLVAGQIVDIDSEGKEVSLSTLEYIHVHKTAKLLEAAVVCGAIMGGADATSVERLRKYARSIGLLFQVVDDILDVTKSSEELGKTAGKDLASDKATYPKLMGIDEAKKFAAQLVDEANQGLAFFDHVKAAPLYHFANYIATRQN

SEQ ID NO: 33 - DNA, 1059 bp, Populus balsamifera subsp. trichocarpa
  misc_feature: Ceres Annot ID no. 1445504
  misc_feature: Encodes the peptide sequence at SEQ ID NO. 34
atggccttctctgcaatattccggagctttaacagttcattttttctcaaaaactccatcaatcaccttaaaaatccaccaaaaaccccacgaggccacctctatctttccaccatgaaatttgcaagctcgaatctgaagcaaacgaatcaagcccaagaggtcccttcacttgcatttcagttcaaagaatacatgctcaccaagttgaagcaagtgaacgaagcactagaagaggcagtgcccttgcaacaccccattaaaatccatgaagcaatgagatattctctccttggtaatggaaaacgaatgtgtccgattttatgcattgcttcatgtgagttggtcggaggggatgaagaactagcgatgccattggcatgtgctctagagatggtgcatgccatgtcactaatccacgatgatcttccttgcatggacaatgatgatcttagacgaggcaaacccacaaaccataaagtatttggtgaatgtattgcaattcttgcaggtgatgcactcctatcacttgcttttgagcacatagctagcaagaccaagaacgtttcgccagactgcgtggttcgagccattgcggagcttggttcagctattgggtcaagaggtgtagtagcaggccagattgtggacattgatagtgaaggaaaagaagtaagcatgaagacgctagagtatattcatgtccataaaacagcaaagcttctagaggcatctgctgtttgtggggcaataatgggaggggcagatgatgcaagcattgaaaggcttagaaaatatgctaggtctattgggttgttgtatcaggtggtggatgatatattagatgcaaccaagtcctcagaggagctaggaaagacagccgggaaggatttggcaagtaacaaggctacatatcccaagttgatgggcatagatgaggccaagaaatttgctgctgagttggttgagcaagccaaaaaagaaattgctagctttgattctgccaaggctgtcccattgttccatttagctgactacattgctaggcgacagagttag

SEQ ID NO: 34 - protein, 314 aa, Populus balsamifera subsp. trichocarpa
  misc_feature (51)..(311): Pfam name: polyprenyl_synt Pfam desc: Polyprenyl synthetase
  misc_feature: Ceres Annot ID no. 1445504
  misc_feature: Bit score of 585.5 for HMM based on sequences of Figure 1
  misc_feature: Functional Homolog Of Ceres Clone ID no. 29678 at SEQ ID NO. 2
MKFASSNLKQTNQAQEVPSLAFQFKEYMLTKLKQVNEALEEAVPLQHPIKIHEAMRYSLLGNGKRMCPILCIASCELVGGDEELAMPLACALEMVHAMSLIHDDLPCMDNDDLRRGKPTNHKVFGECIAILAGDALLSLAFEHIASKTKNVSPDCVVRAIAELGSAIGSRGVVAGQIVDIDSEGKEVSMKTLEYIHVHKTAKLLEASAVCGAIMGGADDASIERLRKYARSIGLLYQVVDDILDATKSSEELGKTAGKDLASNKATYPKLMGIDEAKKFAAELVEQAKKEIASFDSAKAVPLFHLADYIARRQS

SEQ ID NO: 35 - DNA, 1038 bp, Populus balsamifera subsp. trichocarpa
  misc_feature: Ceres Annot ID no. 1460575
  misc_feature: Encodes the peptide sequence at SEQ ID NO. 36
atggctctctctctcgcagcgttaccatcactatctattactctctgtatccctaaaaaaggctcaaatctttaccctccgaagctaaacaaaatgtcaccaattcaatgttctttatcagtttcaacccattcaaaaacaccccagtttgatttaaagacttattggacaaccttgattctagaaatcaatcagaagcttgaccaagccgttcctattcagtatccagataagatttatgaggccatgaggtattctgttcttgctaaaggtgctaaaagagcccctcctgttatgtgtgttgctgcttgtgagctctttggtggtaatcgtcatgctgccttccctactgcttgtgctcttgaaatggttcattcagcttcgttgattcatgatgaccttccctgcatggacgatgacccatcacgtcgaggccagccttcaaaccacaaaatttatggcgttgatatggcaatccttgccggggatgcactcttccctcttggctttcgccacattgtatcccacacaccttctgaccttgtaccagagccacgacttctcagtgtgattgcagagattgctcgtgctgtggggtccacaggcatggctgctgggcagttccttgaccttgagggtggccccaattccgttgaatttgttcaggagaagaaatttggtgaaatgggtgagtgctctgcggtgtgtggaggattgctagccggtgccaaggatgatgagatacagagattgaggagatatggaagagctgttggggtattatatcaagtcgttgatgacatcttggaagcaaaaacgatgaagagcaaggtagatgaggacaagaagaaaaggaaagggaagagttatgttgctttatatggggttgagaaggctatagaggtagcggaggagctgagagccaaggctaaagaagaattggatgggtttgagaaatatggtgagagtgtattgccactttatagcttcgtggattatgctgctgatagaggtttcagttttggtgagtcaagttag

SEQ ID NO: 36 - protein, 314 aa, Populus balsamifera subsp. trichocarpa
  misc_feature (48)..(304): Pfam name: polyprenyl_synt Pfam desc: Polyprenyl synthetase
  misc_feature: Ceres Annot ID no. 1460575
  misc_feature: Bit score of 324.2 for HMM based on sequences of Figure 1
  misc_feature: Functional Homolog Of Ceres Clone ID no. 29678 at SEQ ID NO. 2
MSPIQCSLSVSTHSKTPQFDLKTYWTTLILEINQKLDQAVPIQYPDKIYEAMRYSVLAKGAKRAPPVMCVAACELFGGNRHAAFPTACALEMVHSASLIHDDLPCMDDDPSRRGQPSNHKIYGVDMAILAGDALFPLGFRHIVSHTPSDLVPEPRLLSVIAEIARAVGSTGMAAGQFLDLEGGPNSVEFVQEKKFGEMGECSAVCGGLLAGAKDDEIQRLRRYGRAVGVLYQVVDDILEAKTMKSKVDEDKKKRKGKSYVALYGVEKAIEVAEELRAKAKEELDGFEKYGESVLPLYSFVDYAADRGFSFGESS

SEQ ID NO: 37 - DNA, 1044 bp, Populus balsamifera subsp. trichocarpa
  misc_feature: Ceres Annot ID no. 1450618
  misc_feature: Encodes the peptide sequence at SEQ ID NO. 38
atggtggtatcttctcttatagcaatatcatcaccacttactactactatctacctccctgtaaaaagcccaaatctttacactaaaatacttggcaaaatgtcaaaaattcaatgttctttatcagtttcaagccaatcaaagacagcgcagtttgatttaaagacttattggacaaccttgattggagaaatcaatcaggaactagaccaagctgttcctattcagtatccagataagatttatgaggccatgaggtattctgttcttgcaaaaggtgctaaaagagcccctccagttatgtgtgttgctgcttgtgaactctttggtggtaatcgcctcgccgccttccctactgcttgtgctcttgaaatggttcatgcagcttcgttgatccatgacgaccttccctgcatggatgatgacccatcacgacgaggtcaaccttcaaaccacacaatttatggtgttgatatggcaatccttgctggggatgcgctcttccctcttggctttagccatattgtctcccagacgccttctgaccttgtaccagagccacgacttctccgcgtgattgctgagattgctcgtgctgtggggtccagaggcatggctgccgggcagttcctagaccttgagggcggccctaatgctgttgaatttgttcaagagaagaaatatggtgaaatgggtgagtgctctgcagtgtgtggaggattgctagctggtgctacggatgatgagatacggagattgaggagatatggaagagctgttggtgtattatatcaagtcgttgatgacatcttggaagcaaaaacgatgaagagcaagttagatgaggaggagaagagaaagaaagggaagagctatgttgctgtttacggggttgagaaggctacagaggtggcggaggagctgagagccaaggctaaaaaggaactggatggctttgagaaatacggcgagagtgtagtgccactctacagcttcgtggactacgctgctgatagaggtttcagttttggcgagtcaatttaa

SEQ ID NO: 38 - protein, 314 aa, Populus balsamifera subsp. trichocarpa
  misc_feature (48)..(304): Pfam name: polyprenyl_synt Pfam desc: Polyprenyl synthetase
  misc_feature: Ceres Annot ID no. 1450618
  misc_feature: Bit score of 320.1 for HMM based on sequences of Figure 1
  misc_feature: Functional Homolog Of Ceres Clone ID no. 29678 at SEQ ID NO. 2
MSKIQCSLSVSSQSKTAQFDLKTYWTTLIGEINQELDQAVPIQYPDKIYEAMRYSVLAKGAKRAPPVMCVAACELFGGNRLAAFPTACALEMVHAASLIHDDLPCMDDDPSRRGQPSNHTIYGVDMAILAGDALFPLGFSHIVSQTPSDLVPEPRLLRVIAEIARAVGSRGMAAGQFLDLEGGPNAVEFVQEKKYGEMGECSAVCGGLLAGATDDEIRRLRRYGRAVGVLYQVVDDILEAKTMKSKLDEEEKRKKGKSYVAVYGVEKATEVAEELRAKAKKELDGFEKYGESVVPLYSFVDYAADRGFSFGESI

SEQ ID NO: 39 - protein, 360 aa, Arabidopsis thaliana
  misc_feature (93)..(356): Pfam name: polyprenyl_synt Pfam desc: Polyprenyl synthetase
  misc_feature: Public GI ID no. 15231881
  misc_feature: Bit score of 664.1 for HMM based on sequences of Figure 1
  misc_feature: Functional Homolog Of Ceres Clone ID no. 29678 at SEQ ID NO. 2
MATTVHLSSFSLFIQSRGRRDNSISSVKSLKKRTGLSPSSALTSQGGRDMIPPEGKCNDHNSAFDFKLYMIRKAESVNAALDVSVPLREPLTVQEAVRYSLLAGGKRVRPLLCIAVCELVGGDEATAMSAACAVEMIHTSSLIHDDLPCMDNADLRRGKPTNHKVYGEDMAVLAGDALLALAFEHMTVVSSGLVAPERMIRAVVELARAIGTTGLVAGQMIDLASERLNPDKVGLEHLEFIHLHKTAALLEAAAVLGVIMGGGTEEEIEKLRKYARCIGLLFQVVDDILDVTKSTEELGKTAGKDVMAGKLTYPRLIGLERSKEVAEKLRREAEEQLLGFDPSKAAPLVALASYIACRHN

SEQ ID NO: 40 - protein, 360 aa, Arabidopsis thaliana
  misc_feature (93)..(356): Pfam name: polyprenyl_synt Pfam desc: Polyprenyl synthetase
  misc_feature: Public GI ID no. 26450928
  misc_feature: Bit score of 663.6 for HMM based on sequences of Figure 1
  misc_feature: Functional Homolog Of Ceres Clone ID no. 29678 at SEQ ID NO. 2
MATTVHLNSFSLFIQSRGRRDNSISSVKSLKKRTGLSPSSALTSQGGRDMIPPEGKCNDHNSAFDFKLYMIRKAESVNAALDVSVPLREPLTVQEAVRYSLLAGGKRVRPLLCIAVCELVGGDEATAMSAACAVEMIHTSSLIHDDLPCMDNADLRRGKPTNHKVYGEDMAVLAGDALLALAFEHMTVVSSGLVAPERMIRAVVELARTIGTTGLVAGQMIDLASERLNPDKVGLEHLEFIHLHKTAALLEAAAVLGVIMGGGTEEEIEKLRKYARCIGLLFQVVDDILDVTKSTEELGKTAGKDVMAGKLTYPRLIGLERSKEVAEKLRREAEEQLLGFDPSKAAPLVALASYIACRHN

SEQ ID NO: 41 - protein, 360 aa, Arabidopsis thaliana
  misc_feature (93)..(356): Pfam name: polyprenyl_synt Pfam desc: Polyprenyl synthetase
  misc_feature: Public GI ID no. 15232010
  misc_feature: Bit score of 637.7 for HMM based on sequences of Figure 1
  misc_feature: Functional Homolog Of Ceres Clone ID no. 29678 at SEQ ID NO. 2
MANTVHLSSSSLFIQTRGRKYNSILSFNNLQKRTVLSLSCALTSQGGKDMIPPKGKSNDRNFAFDFKSYMIRKAESVSMALNVSVPPQDPLAIQEAVRYSLLAGGKRVRPLLCIAACELVGGDEATAMSAACAVEMIHTSSLIHDDLPCMDDADLRRGKPTNHKVFGEHMAVLAGDALLALAFEHMTVVSSGLVAPERMIRSVTELAKAIGTKGLVAGQVSDLCSQGLNPYDVGLERLEFIHLHKTAALLEAAAVLGAIIGGGTEEEIQKLRKYGRCIGLLFQVVDDIIDVTESTEELGKTAGKDVMARKLTYPRLIGLERSREVAEKLRREAAEQLLGFDSNKVAPLVALASYIACRHN

SEQ ID NO: 42 - protein, 360 aa, Arabidopsis thaliana
  misc_feature (93)..(356): Pfam name: polyprenyl_synt Pfam desc: Polyprenyl synthetase
  misc_feature: Public GI ID no. 62320250
  misc_feature: Bit score of 635.2 for HMM based on sequences of Figure 1
  misc_feature: Functional Homolog Of Ceres Clone ID no. 29678 at SEQ ID NO. 2
MANTVHLSSSSLFIQTRGRKYNSILSFNNLQKRTVLSLSCALTSQGGKDMIPPKGKSNDRNFAFDFKSYMIRKAESVSMALNVSVPPQDPLAIQEAVRYSLLAGGKRVRPLLCIAACELVGGDEATAMSAACAVEMIHTSSLIHDDLPCMDDADLRRGKPTNHKVFGEHMAVLAGDALLALAFEHMTVVSSGLVAPERMIRSVTELAKAIGTKGLVAGQVSDLCSQGLNPYDVGLERLEFIHLHKTAALLEAAAVLGAIIGGGTEEEIQKLRKYGRCIGLLFQVVDDIIDVTESTEELGKTAGKDVKARKLTYPRLIGLERSREVAEKLRREAAEQLLGFDSNKVAPLVALASYIACRHN

SEQ ID NO: 43 - protein, 371 aa, Arabidopsis thaliana
  misc_feature (103)..(367): Pfam name: polyprenyl_synt Pfam desc: Polyprenyl synthetase
  misc_feature: Public GI ID no. 15234534
  misc_feature: Bit score of 709.5 for HMM based on sequences of Figure 1
  misc_feature: Functional Homolog Of Ceres Clone ID no. 29678 at SEQ ID NO. 2
MASVTLGSWIVVHHHNHHHPSSILTKSRSRSCPITLTKPISFRSKRTVSSSSSIVSSSVVTKEDNLRQSEPSSFDFMSYIITKAELVNKALDSAVPLREPLKIHEAMRYSLLAGGKRVRPVLCIAACELVGGEESTAMPAACAVEMIHTMSLIHDDLPCMDNDDLRRGKPTNHKVFGEDVAVLAGDALLSFAFEHLASATSSDVVSPVRVVRAVGELAKAIGTEGLVAGQVVDISSEGLDLNDVGLEHLEFIHLHKTAALLEASAVLGAIVGGGSDDEIERLRKFARCIGLLFQVVDDILDVTKSSKELGKTAGKDLIADKLTYPKIMGLEKSREFAEKLNREARDQLLGFDSDKVAPLLALANYIAYRQN

SEQ ID NO: 44 - protein, 371 aa, Arabidopsis thaliana
  misc_feature (103)..(367): Pfam name: polyprenyl_synt Pfam desc: Polyprenyl synthetase
  misc_feature: Public GI ID no. 413730
  misc_feature: Bit score of 702.6 for HMM based on sequences of Figure 1
  misc_feature: Functional Homolog Of Ceres Clone ID no. 29678 at SEQ ID NO. 2
MASVTLGSWIVVHHHNHHHPSSILTKSRSRSCPITLTKPISFRSKRTVSSSSSIVSSSVVTKEDNLRQSEPSSFDFMSYIITKAELVNKALDSAVPLREPLKIHEAMSYSLLAGGKRVRPVLCIAACELVGGEESTAMPARCAVEMIHTMSLIHDDLPCMDNDDLRRGKPTNHKVFGEDVAVLAGDALLSFSFEHLASATSSDVVSPVRVVRAVGELAKAIGTEGLVAGQVVDISSEGLDLNDVGLEHLEFIHLHKTAALLEASAVLGAIVGGGSDDEIERLRKFARCIGLLFQVVDDILDVTKSSKELGKTAGKDLIADKLTYPKIMGLEKSREFAEKLNREARDQLLGFDSDKVAPLLALANYIAYRQN

SEQ ID NO: 45 - protein, 347 aa, Arabidopsis thaliana
  misc_feature (82)..(343): Pfam name: polyprenyl_synt Pfam desc: Polyprenyl synthetase
  misc_feature: Public GI ID no. 15224197
  misc_feature: Bit score of 662.8 for HMM based on sequences of Figure 1
  misc_feature: Functional Homolog Of Ceres Clone ID no. 29678 at SEQ ID NO. 2
MTTLNLSIFPSVKISSSASIPGFIKIQPFLLRRKLSTVLSVTARDEGIIHNHFDFTSYMIGKANAVNEALDSAVSLREPIKIHEAIRYSLLARGKRVRPVLCIAACELVGGEESVALPAACAVEMIHTMSLIHDDLPCMDNDDLRRGKPTNHKVFGEDVAVLAGDALISFAFEHLATSTAVSPARVVRAIGELAKAIGSKGLVAGQVVDLTSGGMDQNDVGLEVLEFIHVHKTAVLLEAATVLGAIVGGGSDEEVEKLRRFARCIGLLFQVVDDILDVTKSSEELGKTAGKDLIADKLTYPKLMGLEKSKDFADKLLSDAHEQLHGFDSSRVKPLLALANYIAKRQN

SEQ ID NO: 46 - protein, 372 aa, Arabidopsis thaliana
  misc_feature (108)..(368): Pfam name: polyprenyl_synt Pfam desc: Polyprenyl synthetase
  misc_feature: Public GI ID no. 15224199
  misc_feature: Bit score of 596.4 for HMM based on sequences of Figure 1
  misc_feature: Functional Homolog Of Ceres Clone ID no. 29678 at SEQ ID NO. 2
MEAQNIFLYLLIVFLSLHFVFTTLKGRLSPANTRRLIRLLHIPIKSPVAAAIFARKDTREFLDSSIKLVNEEDDFGFSFDFKPYMISKAETINRALDEAIPLIEPLNIHKAMRYAILAGGKRVRPILCLAACELVGGEERLAIQAACAVEMIHTMSLIKDDLPCMDNDDLRRGKPTTHKVFGESVAILSGGALLALAFEHLTEADVSSKKMVRAVKELAKSIGTKGLVAGQAKDLSSEGLEQNDVGLEDLEYIHVHKTGSLLEASAVIGAVIGGGTEKEIEKVRNFARCIGLLFQVVDDILDETKSSEELGKTAGKDKVAGKLTYPKVIGVEKSKEFVEKLKRDAREHLQGFDSDKVKPLIALTNFIANRNH

SEQ ID NO: 47 - DNA, 1438 bp, Glycine max
  misc_feature: Ceres Clone ID no. 590924
  misc_feature: Encodes the peptide sequence at SEQ ID NO. 48
actactcatttgcttatccatcatcaacaactctcatttctcatcatcacttcccacttacgctcggtaatgtctcatttctcacgcatcaacccctaataataatcccccaaacagaacctttcccacccaatccaaacacagccctaaacccccccaccatcatcatgagtgccgtgaatttgaacacatggccacgccccagcttcattttgaaccaaaccgccacaagaagatccagatcctccccaacctctcatttctttcacggcgtcaataagttaccgtcacccatttcctccctcaccgttgccaaacgctcatttacgctctcggcggtgctgacgaaagaggacaccgtggagacggaagagaagccaccgattttcgacttcaagaactacatggtttccaaagcgagcgcggtgaacaaggccctcgacgacgccgtttcgctccgcgagccgcagaagatccacgaggcgatgcggtactcgctcctcgccggcggcaagcgcgtgaggccggttttgtgcgtggcggcctgcgagctcgtcggcggcgaggaggccacggcgatgcccgccgcctgcgccatcgagatgatccacaccatgtcgctcatccacgatgacctcccctgcatggacaacgacgacctccgccgcggtaagcccaccaaccacaaggtcttcggcgaggacgtcgccgtcctcgccggcgacgcgctcctcgccttcgccttcgagcacatcgccgcctccacccggggcgcctccccggggcggatcgtccgcgcgatcggcgagcttgcgcggtcgatcggctccgagggacttgtcgccggccaggtcgtcgacatcaactccgagggcctggccgacgtggacctcgagcgcctcgagttcatccacgtccacaagactgccgcgctcctcgagggtgcggtggtgctcggcgccatcctcggcggcggcaccgacgacgaggtcgagaaattgagaaaattcgctcgctacattggtctgctctttcaggttgttgatgacattctcgatgttaccaagtcatctcaggaattggggaaaaccgcaggaaaagaccttgtggcagataaggttacttaccccaaacttttgggtattgagaaatctaaggtgtttgctgcgaagttgaacaaagatgctcaggatcagcttgttgggtttgaccctgttaaggctgctcctttgattgctttagccaattacattgcttataggcagaactagattgtttgtttaggaaagtttagatttatgaaatcatattggattaacatttacttattggctattgcaatgcaactagggattataaaataataatacccccttgcccttyttctatgtgccttagtcgtcaattttgtatgatgaatgaatataaatatttttat

SEQ ID NO: 48 - protein, 367 aa, Glycine max
  misc_feature (103)..(363): Pfam name: polyprenyl_synt Pfam desc: Polyprenyl synthetase
  misc_feature: Ceres Clone ID no. 590924
  misc_feature: Bit score of 709.3 for HMM based on sequences of Figure 1
  misc_feature: Functional Homolog Of Ceres Clone ID no. 29678 at SEQ ID NO. 2
MSAVNLNTWPRPSFILNQTATRRSRSSPTSHFFHGVNKLPSPISSLTVAKRSFTLSAVLTKEDTVETEEKPPIFDFKNYMVSKASAVNKALDDAVSLREPQKIHEAMRYSLLAGGKRVRPVLCVAACELVGGEEATAMPAACAIEMIHTMSLIHDDLPCMDNDDLRRGKPTNHKVFGEDVAVLAGDALLAFAFEHIAASTRGASPGRIVRAIGELARSIGSEGLVAGQVVDINSEGLADVDLERLEFIHVHKTAALLEGAVVLGAILGGGTDDEVEKLRKFARYIGLLFQVVDDILDVTKSSQELGKTAGKDLVADKVTYPKLLGIEKSKVFAAKLNKDAQDQLVGFDPVKAAPLIALANYIAYRQN

SEQ ID NO: 49 - protein, 316 aa, Lupinus albus
  misc_feature (52)..(312): Pfam name: polyprenyl_synt Pfam desc: Polyprenyl synthetase
  misc_feature: Public GI ID no. 558925
  misc_feature: Bit score of 686.7 for HMM based on sequences of Figure 1
  misc_feature: Functional Homolog Of Ceres Clone ID no. 29678 at SEQ ID NO. 2
MLTKEDTVKDKEEEEEEEEKPRFNFNLYMVEKSRSVNQALNDAVSLREPHKIHEAMRYSLLAGGKRVRPVLCIAACEVVGGNESTAMAAACSIEMIHTMSLIHDDLPCMDNDDLRRGKPTNHKVFGENIAVLAGDALLAFAFEHIAVSTSGVSPERIIGAIGELAKSIGTEGLVAGQVVDINSEGLCDIGLEKLEFIHLHKTAALLEGSVVVGAILGGGCNEEVEKLRMFARYIGLMFQVVDDVLDVTKSSKELGKTAGKDLVADKVTYPKLLGIEKSNEFAQKLNRDAQEQLSGFDPVKVAPLIALANYIAYSPN

SEQ ID NO: 50 - protein, 370 aa, Hevea brasiliensis
  misc_feature (106)..(366): Pfam name: polyprenyl_synt Pfam desc: Polyprenyl synthetase
  misc_feature: Public GI ID no. 164605012
  misc_feature: Bit score of 722.5 for HMM based on sequences of Figure 1
  misc_feature: Functional Homolog Of Ceres Clone ID no. 29678 at SEQ ID NO. 2
MSSVNLGSWVHTSYVLNQATRSRSKSKSFSLPFNPLKSLAISFAYRKSERPISSVSAIITKEEETLQEEQNNPPPSFDFKSYMLQKANSINQALEAAIPLQEPAKIHESMRYSLLAGGKRVRPALCLAACELVGGNDSMAMPAACAVGMIHTMSLIHDDLPCMDNDDLRRGKPTNHIVFGEDVAVLAGDALLAFAFEHIAVSTLNVSSARIVRAVGELAKAIGAEGLVAGQVVDINSEGSSEVDLEKLEFIHIHKTAKLLEGAVVLGAILGGGTDEEVEKLRKYARGIGLLFQVVDDILDVTKSSQELGKTAGKDLVADKVTYPKLLGIEKSREFAEKLNKEAQEQLAGFDPEKAAPLIALANYIAYRQN

SEQ ID NO: 51 - protein, 366 aa, Daucus carota
  misc_feature (101)..(362): Pfam name: polyprenyl_synt Pfam desc: Polyprenyl synthetase
  misc_feature: Public GI ID no. 4958918
  misc_feature: Bit score of 648.0 for HMM based on sequences of Figure 1
  misc_feature: Functional Homolog Of Ceres Clone ID no. 29678 at SEQ ID NO. 2
MASVMNLSITHFCSSHLKQKSPNKLVFHGLNSNPNFSKSKPPQNVIPYSSLSISSVQTTKIVMDSSPTPSTFDFKSYMLEKAISVNKALDASVSLQEPVKIHESMRYSLLAGGKRVRPLLSIAACELFGGHEAVAMPSACAVEMIHTMSLMHDDLPFMDNDDLRRGKPTNHKVYGESVAVLAGDAMLALAAFHLVATETRGVSSDQVVRVIVELAKAIGAEGLVAGQIVDVCSEGDPNLGLEDLEFIHRSKTAALLEGSVVMGAILGGANDEEVEKVRKYARCIGLLFQVVDDILDVTKSSKELGKTAGKDLVADKTTYPKLIGIEKSREFSDELKREAIDQLAGFNSDKTAPLIAMANYIANRDN

SEQ ID NO: 52 - protein, 367 aa, Daucus carota
  misc_feature (103)..(363): Pfam name: polyprenyl_synt Pfam desc: Polyprenyl synthetase
  misc_feature: Public GI ID no. 4958920
  misc_feature: Bit score of 616.2 for HMM based on sequences of Figure 1
  misc_feature: Functional Homolog Of Ceres Clone ID no. 29678 at SEQ ID NO. 2
MAFIQTNTAHENSLLSKNLLFDHLKNTGKTPSSYCTRHHPMKIQGANAVNSTLVQSVNVQELLTNPRVTPGPEFHFEGYMKTSGKKINKALDEAVPVQKPAIIHEAMRYSLLAGGKRVRPVLCIASCELVGGLESWAMPMACALEMIHTMSLIHDDLPCMDNDDLRRGKPTNHKVYGEETAILAGDALLSLAFEHVADATDMVTPGRVVRAIAELGSAVGSQGLVAGQIMDICNQGKDVDLNDLEYIHVHKTSKLLEASVVCGAILGGGNVIEVERLRKYARCIGLLFQVVDDILDVTKSSAELGKTAGKDLVTDKTTYPKLMGLERAKRFATELVAQAEEELSYFGSSARVAPLYHLAKYIAYRQN

SEQ ID NO: 53 - protein, 357 aa, Catharanthus roseus
  misc_feature (93)..(353): Pfam name: polyprenyl_synt Pfam desc: Polyprenyl synthetase
  misc_feature: Public GI ID no. 13431546
  misc_feature: Bit score of 715.1 for HMM based on sequences of Figure 1
  misc_feature: Functional Homolog Of Ceres Clone ID no. 29678 at SEQ ID NO. 2
MRSNLCHPLKNQLPISFFLSGTIRKPIFSCSRLSISAIITKEQTQEESESKSKKEVAFSSSSSFDFKAYMIGKANSVNKALEDAVLVREPLKIHESMRYSLLAGGKRVRPMLCIAACELFGGTESVAMPSACAVEMIHTMSLMHDDLPCMDNDDLRRGKPTNHKVFGEDVAVLAGDALLAFAFEHIATATKGVSSERIVRVVGELAKCIGSEGLVAGQVVDVCSEGIADVGLEHLEFIHIHKTAALLEGSVVLGAIVGGANDEQISKLRKFARCIGLLFQVVDDILDVTKSSQELGKTAGKDLVADKVTYPKLLGIDKSREFAEKLNREAQEQLAEFDPEKAAPLIALANYIAYRDN

SEQ ID NO: 54 - protein, 369 aa, Capsicum annuum
  misc_feature (105)..(365): Pfam name: polyprenyl_synt Pfam desc: Polyprenyl synthetase
  misc_feature: Public GI ID no. 121145
  misc_feature: Bit score of 679.5 for HMM based on sequences of Figure 1
  misc_feature: Functional Homolog Of Ceres Clone ID no. 29678 at SEQ ID NO. 2
MRSMNLVDLWAQQACLVFNQTLSYKSFNGFMKIPLKNSKINPKLNKKRPFSPLTVSAIATTKEDERIEAAQTEEPFNFKIYVTEKAISVNKALDEAIIVKEPHVIHEAMRYSLLAGGKRVRPMLCLAACELVGGNQENAMAAACAVEMIHTMSLIHDDLPCMDNDDLRRGKPTNHKIYGEDVAVLAGDSLLAFAFEHIVNSTAGVTPSRIVGAVAELAKSIGTEGLVAGQVADIKCTGNASVSLETLEFIHVHKTAALLESSVVLGAILGGGTNVEVEKLRRFARCIGLLFQVVDDILDVTKSSEELGKTAGKDLVVDKTTYPKLLGLEKAKEFAAELNREAKQQLEGFDSRKAAPLIALADYIAYRDN

SEQ ID NO: 55 - protein, 356 aa, Helianthus annuus
  misc_feature (91)..(352): Pfam name: polyprenyl_synt Pfam desc: Polyprenyl synthetase
  misc_feature: Public GI ID no. 3885426
  misc_feature: Bit score of 664.9 for HMM based on sequences of Figure 1
  misc_feature: Functional Homolog Of Ceres Clone ID no. 29678 at SEQ ID NO. 2
MRPMSLVHSCSIFTGSSFIKTTPINNKPTFKIHQRPTIRSTISAAIVEEEVVELQQKPKPTFNFNAYMLGKGNSVHKALDESIMIKNPPTIHEAMRYSLLAGGKRVRPILCIAACELVGGEEATAMPAACAVEMIHTMSLIHDDLPCMDNDDFRRGKPTNHKVYGEDVAVLAGDSLLAFAFEYVSSRTEGASPARVLAAIGELAKSIGTEGLVAGQVVDIASTGGQDIGLDQLEFIHIHKTAALLEASVVLGAILGGGSDAQVEKLRTFARCIGLLFQVVDDILDVTKSSEELGKTAGKDLLVDKTTYPKLLGLDKSRQFAEELLAEAKQQLEEFESQAAVAPLLALAEYIAYRQN

SEQ ID NO: 56 - protein, 288 aa, Eucommia ulmoides
  misc_feature (24)..(284): Pfam name: polyprenyl_synt Pfam desc: Polyprenyl synthetase
  misc_feature: Public GI ID no. 14422402
  misc_feature: Bit score of 651.9 for HMM based on sequences of Figure 1
  misc_feature: Functional Homolog Of Ceres Clone ID no. 29678 at SEQ ID NO. 2
MLGKADSVNKALEATVLLRYPIKIHESMRYSILAGGKRVRPLLCIAACELVGGQESTAMPAACAVEMIHTMSLMHDDLPCMDNDDLRRGKPTNHMVFGEDVAVLAGDSLLAFAFELIATSTTGVPADRIVRVIGELAKSIGSEGLVAGQVIDICSEGMTDVGLEHLEFIHVHKTAALLEGSVVLGAILGGATDPEVEKLRKFARCIGFLFQVVDDILDVTKSSQELGKTAGKDLVADKTTYPKLIGLEKSREFAEKLNREAQDQLAAFDIEKAAPLIALANYIAYRNN

SEQ ID NO: 57 - DNA, 1068 bp, Sorghum bicolor
  misc_feature: Ceres Annot ID no. 8659367
  misc_feature: Encodes the peptide sequence at SEQ ID NO. 58
atgaacaagttggcatcgtcctgcttcctccagcacggagcaccctcctcccaaagcttcaagttgaagccttgccatgtccagagatccccttcactgcagttgtttgacagacgatccgtttccatgccccggcgtgctgcggaccatgctgccagagccaccaccgtcgacgtcgccgtcgtcaccggcaccaccaccttcgacatcgagcgctacctgtccgccaacgccaggaccgtgcacgacgcgctggaccttgccctgcagggccttgggtgccccgaggtcctgcgcgagtccatgcgctactccgtcctcgcgggcggcaagcgcctccgccccgcgctggcgatcgccgcgtgcgagctcgtgggcggtcccgcggcggcggccgtcccggtggcctgcgccgtcgagatgatgcacaccgcgtcgctcatccacgacgacatgccgtgcatggacgacgacccgctccgccgcggccgaccctccaaccacgtcgcgttcggcgagcccacggcgctgctctcgggcgacgcgctcctggcgctcgcgttcgagcacgtcgcccgtgcaagcgccggcgccggcgtccccgcggaccgcgcgctccgagccgtcctggagctcgggagcgcagctggagtcggcggaatcgccgcggggcaggtcgccgacatgctggccgcgctggagtacatccacgtgcacaagacggcgcggctagtggaggccgcggcggtgtcgggcgccgtcgtcgggggcggtggcgacggcgaggtcgagcgcgtccgtcggtacgcgcacttcttggggcttctgctccaggtggtggacgacgttctggacgtgacggccacgtcggagcagctcgggaagacggcgggcaaggacgcggccgccggcaaggccacgtacccgcggctgatgggcatggagggggcgcgcgcatacatgggcgagctactggcgaaggccgaggcggagctcgacgggttcgacgccgcgcgtgcggtgccgctgctgcacctcgcgcggttcatggcgtacagacagcactga

SEQ ID NO: 58 - protein, 355 aa, Sorghum bicolor
  misc_feature (98)..(351): Pfam name: polyprenyl_synt Pfam desc: Polyprenyl synthetase
  misc_feature: Ceres Annot ID no. 8659367
  misc_feature: Bit score of 441.9 for HMM based on sequences of Figure 1
  misc_feature: Functional Homolog Of Ceres Clone ID no. 29678 at SEQ ID NO. 2
MNKLASSCFLQHGAPSSQSFKLKPCHVQRSPSLQLFDRRSVSMPRRAADHAARATTVDVAVVTGTTTFDIERYLSANARTVHDALDLALQGLGCPEVLRESMRYSVLAGGKRLRPALAIAACELVGGPAAAAVPVACAVEMMHTASLIHDDMPCMDDDPLRRGRPSNHVAFGEPTALLSGDALLALAFEHVARASAGAGVPADRALRAVLELGSAAGVGGIAAGQVADMLAALEYIHVHKTARLVEAAAVSGAVVGGGGDGEVERVRRYAHFLGLLLQVVDDVLDVTATSEQLGKTAGKDAAAGKATYPRLMGMEGARAYMGELLAKAEAELDGFDAARAVPLLHLARFMAYRQH

SEQ ID NO: 59 - DNA, 1029 bp, Sorghum bicolor
  misc_feature: Ceres Annot ID no. 8681395
  misc_feature: Encodes the peptide sequence at SEQ ID NO. 60
atggctctctcctccctcttcatcaccctccccgtccccaaggtcccttcctccaactcccgccgcttgctcaccgcccgggcgtcctccgccgccgctcccgccgcctctgcttccttcgacctgcgccgctactggacctctctgatcgccgatgtggagtccgaactcgacgccgcgatgcccatgcagcctccggagagcatccactccgccatgcgctacgcggtgctcccgggcgccggcaaggagggcgccgccaagcgggcgccccccgtgctgtgcgtcgccgcgtgcgagctcctcgggggcccgcgcgcggccgcgctcccggccgccgcggcgctggagatgctccacgcggcgtcgctcgtgcacgacgacctgccctgcttcgacgcagccccgacgcggcgcgggcgcccgtccacgcacgcggcgtacggcaccgacatggccgtcctcgcgggggacgctctcttcccgctcgcctacacccacgtcatctcccacaccccgtccccggacccggtcccgcacgccgtcctcctgcgcgtcctcgcggagctcgcgcgcgccgtcggatccaccggcatggcggccggccagttcctcgatctggccggcgccaccgcccttggcgaggccgaggtcatgcaggtcctgacgaagaagttcggcgagatggccgagtgctccgccgcctgcggcgccatgctcggtggggcagggcccgacgaggaggccgcgctgcggcgctacggccgcaccatcggcgtcctgtacgagctcgtcgacgacgtccggagcgcgtcgggcaacggaaagatgaggaggaacgccagcgtcctgcgctccctggggatggaccgcgcgctgggcattgtggaggagctcaaggctcaggccaagacagaggctgacaggttcggggacaagtatggcgatcgggtgctgcccttgtacagcttcgtggactacgcggtggagagagggtttgagctccagggtgcagcggcaacttcatag

SEQ ID NO: 60 - protein, 342 aa, Sorghum bicolor
  misc_feature (69)..(329): Pfam name: polyprenyl_synt Pfam desc: Polyprenyl synthetase
  misc_feature: Ceres Annot ID no. 8681395
  misc_feature: Bit score of 235.5 for HMM based on sequences of Figure 1
  misc_feature: Functional Homolog Of Ceres Clone ID no. 29678 at SEQ ID NO. 2
MALSSLFITLPVPKVPSSNSRRLLTARASSAAAPAASASFDLRRYWTSLIADVESELDAAMPMQPPESIHSAMRYAVLPGAGKEGAAKRAPPVLCVAACELLGGPRAAALPAAAALEMLHAASLVHDDLPCFDAAPTRRGRPSTHAAYGTDMAVLAGDALFPLAYTHVISHTPSPDPVPHAVLLRVLAELARAVGSTGMAAGQFLDLAGATALGEAEVMQVLTKKFGEMAECSAACGAMLGGAGPDEEAALRRYGRTIGVLYELVDDVRSASGNGKMRRNASVLRSLGMDRALGIVEELKAQAKTEADRFGDKYGDRVLPLYSFVDYAVERGFELQGAAATS

SEQ ID NO: 61 - protein, 361 aa, Tagetes erecta
  misc_feature (98)..(357): Pfam name: polyprenyl_synt Pfam desc: Polyprenyl synthetase
  misc_feature: Public GI ID no. 9971808
  misc_feature: Bit score of 703.4 for HMM based on sequences of Figure 1
  misc_feature: Functional Homolog Of Ceres Clone ID no. 29678 at SEQ ID NO. 2
MSLVNPTSLFYGSPIMTRSPIFLNPTRKSQPVSSFSASNFPQISAILTKEHQSNAPEDKIKETQSKFEFDFKSYMLEKANLVNQALDLAVPLKDPIKIHESMRYSLLAGGKRVRPVLCIAACELVGGDGLTAMPAACAVEMIHTMSLMHDDLPCMDNDDFRRGKPTNHMVYGEEIAVLGGDAMLSFAFEHMATATKGVSSDRILRAIGELAKCIGSEGLVAGQVVDICSEGADVGLEHLEFIHLHKTAALLEGSVVLGAILGGGSDGEIEKLRKFARSIGLLFQVVDDILDVTKSSEELGKTAGKDLVSDKTTYPKLLGIEKSREFAEELNKDAQEQLSEFDPRKAAPLIALANYIAYRQN

SEQ ID NO: 62 - protein, 308 aa, Vitis vinifera
  misc_feature (44)..(304): Pfam name: polyprenyl_synt Pfam desc: Polyprenyl synthetase
  misc_feature: Public GI ID no. 147843373
  misc_feature: Bit score of 716.8 for HMM based on sequences of Figure 1
  misc_feature: Functional Homolog Of Ceres Clone ID no. 29678 at SEQ ID NO. 2
MVRGGDTPEEEKPAFNFNAYILDKANSVNKALDDAVPIREPVKVHESMRYSLLAGGKRVRPVLCIAACELVGGDEATAMPAACAVEMIHTMSLMHDDLPCMDNDDLRRGKPTNHKVFGENVAILAGDALLAFAFEHMATATVGVPPGWIVRAVGELAKSIGSEGLVAGQVVDICSEGLKDVGLEHLEYIHVHKTAALLEGAVVLGAILGGGSNEEIEKLRKFARCIGLLFQVVDDILDVTKSSQELGKTAGKDLVADKLTYPKLLGIEKSRELAEQLNKDAKDQLSGFDPDKAAPLIALSNYIAYRQN

SEQ ID NO: 63 - protein, 371 aa, Vitis vinifera
  misc_feature (107)..(367): Pfam name: polyprenyl_synt Pfam desc: Polyprenyl synthetase
  misc_feature: Public GI ID no. 157335383
  misc_feature: Bit score of 699.2 for HMM based on sequences of Figure 1
  misc_feature: Functional Homolog Of Ceres Clone ID no. 29678 at SEQ ID NO. 2
MRSMNLVDRPWVRDFNQSSLFGCALGMSYGPIGAGPGCTSSVRVGTKTPHLRGAVFAIITKEDSVKEGKGPTQKETPFSFKDYMIQKASSVHKALDEAVYVKSPIKIHEAMRYSLLAGGKRVRPALCLAACELVGGDESNAMPAACAVEMIHTMSLIHDDLPCMDNDDLRRGKPTNHKVFGEDVAVLAGDSLLAFAFEHLATATSGVSSSRIVAAVGELAKSIGAEGLVAGQVVDISSTGQSDVGLDQLEFIHIHKTAALLEAAVVLGALLGGGSDEEVEKLRKYARQVGLLFQVVDDILDVTKSSQELGKTAGKDLVTDKATYPKLMGLEKSREFAENLNKEAKEQLSGFDLEKAAPLIALADYIAYRQN

SEQ ID NO: 64 - protein, 285 aa, Vitis vinifera
  misc_feature (24)..(281): Pfam name: polyprenyl_synt Pfam desc: Polyprenyl synthetase
  misc_feature: Public GI ID no. 157336281
  misc_feature: Bit score of 511.7 for HMM based on sequences of Figure 1
  misc_feature: Functional Homolog Of Ceres Clone ID no. 29678 at SEQ ID NO. 2
MLEKAKSVNQALDTAIPLREPLEIHKAMRYSLLDGGKRIHPIVCISACELVGGQESTAMPVVCAVEMLHVVSLMQDDLPCMDNDDIRRGKPSNHKAFGESVTILAVDALLALAFEHVATMSTVGVVPPMVTELARSIGSQGLVAGQFLDLSSEGSPEIGLEGLESIHINKAGPLLEASAVIGAMLGGGSSEQMEILRKFGRCVGLLYQVVDDILDITKSTQELGKTAGKDLVADKVTYPKLVGIEKSREFAEKLNGDAWDMLSEFDQEKAASLLAMVNFATYRQN

SEQ ID NO: 65 - DNA, 1469 bp, Panicum virgatum
  misc_feature: Ceres Clone ID no. 1796324
  misc_feature: Encodes the peptide sequence at SEQ ID NO. 66
atcaccacgcacccaagttcaggaaaccacatccgaaccccaatcctcctcccgaattctccatcgccatggctctctcctccatcttcctccccctccccctgcccaagctcgtttcctcctccagatcccaccgtttgctccccgtcagggcgtcctccgacgcgcccgccgcctccgcttctttcgatctgcgccgctactggacctccctgatcgccgacgtagagtccgagctcgacgccgcgatgcccatgcgccccccggagagcatccacgccgccatgcgctacgcggtcctcccgggcgccggcaaggagggggccgccaagcgggcgccccccgtgctctgcgtcgccgcctgcgagctcctcggcgcgccgcgctcggccgcgctcccggccgcggcggccctcgagatgctccacgcggcgtcgctcgtgcacgacgacctgccgtgcttcgacgccgcgcccacgcgacgcgggcgcccctccacgcacgccgccttcggcaccgacatggccgtcctcgcgggtgacgcactcttcccgctcgcctacacccacatcatcgcgcacaccccgtcgccggacccggtgccccacgccgtcctcctccgcgtcatggcggagctcgcgcgcgccgtcggatccaccggcatggcggcgggccagttcctcgatctggccggcgccaccgccctcggcgaggccgaggtcatgcaggtcctgacgaagaagttcggcgagatggccgagtgctccgcggcctgcggcgccatgctcggcggggccgggcccgacgaggaggccgcgctgcggcgctacggccgcaccatcggcgtcctgtacgagctcgtcgacgacatccggagcgcgtcagggaacggcaagatgaggagcaacgccagcgtcctgcgcgcgctgggcatggatcgcgcgctcggcatcgtggaggagctcaaggcccaggccaagacggaggccgacaggttcgcggacaagtacggtgaccgggtgctgcccctgtacagcttcgtggactacgcggtggagagagggtttgagctccaggatgcagcagcagcgccatgaagagtgcgcgacctcagttggtactgagaaattggagcaagtgcgcgatcgcggctggtactgaacattggagcaagtgacatgtatgttctttagaatgggtgagagctctatttgccgaaattataatccctcctctatagatgtttagatgctcgaattcgtaacttggcgagattcatccggtagagttctcacccctgatacagatgtttagaacttcgaactttctgttgatgtctcggttgaagtttttgtagacatcaacagtcgtgcggtcgtaaaataagatgttactgattactggatgcaagaccaatagattaaggccttgtttagttcccgtcaaaaactttacacatcaattacatc

SEQ ID NO: 66 - protein, 342 aa, Panicum virgatum
  misc_feature (69)..(329): Pfam name: polyprenyl_synt Pfam desc: Polyprenyl synthetase
  misc_feature: Ceres Clone ID no. 1796324
  misc_feature: Bit score of 232.4 for HMM based on sequences of Figure 1
  misc_feature: Functional Homolog Of Ceres Clone ID no. 29678 at SEQ ID NO. 2
MALSSIFLPLPLPKLVSSSRSHRLLPVRASSDAPAASASFDLRRYWTSLIADVESELDAAMPMRPPESIHAAMRYAVLPGAGKEGAAKRAPPVLCVAACELLGAPRSAALPAAAALEMLHAASLVHDDLPCFDAAPTRRGRPSTHAAFGTDMAVLAGDALFPLAYTHIIAHTPSPDPVPHAVLLRVMAELARAVGSTGMAAGQFLDLAGATALGEAEVMQVLTKKFGEMAECSAACGAMLGGAGPDEEAALRRYGRTIGVLYELVDDIRSASGNGKMRSNASVLRALGMDRALGIVEELKAQAKTEADRFADKYGDRVLPLYSFVDYAVERGFELQDAAAAP

SEQ ID NO: 67 - DNA, 1347 bp, Panicum virgatum
  misc_feature: Ceres Clone ID no. 1819213
  misc_feature: Encodes the peptide sequence at SEQ ID NO. 68
aagttccggaaaccacatccgaaccccaatcctcctcccgaattctctccatcgccatggctctctcctccatcttcctccccctccccctgcccaagctactctcctcctccagatcccaccgcttgctccccgtccgggcgtcctccgacgcgcccgccgcctccgcttccttcgatctgcgccgctactggaccaccctgatcgccgacgtcgagtccgagctcgacgccgcgatgcccatgcgccccccggagagcatccacgctgccatgcgctacgcggtcctcccgggcgccggcaaggaggggcccgccaagcgggccccccccgtgctgtgcgtggccgcctgcgagctcctcggcgcgccgcgctcggccgcgctcccggccgcggcggccctcgagatgctccacgcggcgtcgctcgtgcacgacgacctgccctgcttcgacgccgcgcccacgcgacgcgggcgcccctccacgcacgccgccttcggcaccgacatggccgtcctcgcgggcgacgcgctcttcccgctcgcctacacccacatcatcgcgcacaccccgtcgccggacccggtgccccacgccgtcctcctccgcgtcatggcggagcttgcgcgcgccgtcggatccaccggcatggcggcgggccagttcctcgatctggccggcgccaccgcactcggcgaggccgaggtcatgcaggtcctgacgaagaagttcggcgagatggccgagtgctccgcggcctgcggcgccatgctcggcggggccgggcccgacgaggaggccgcgctgcggcgctacggccgcaccatcggcgtcctgtacgagctcgtcgacgacctccggagcgcgtcggggaacggcaagatgaggagcaacgccagcgtcctgcgcgcgctgggcatggaccgcgcgctcggcatcgtggaggagctcaaggcgcaggccaagacggaggccgacaggttcgcggacaagtacggcgaccgggtgctgcccctgtacagcttcgtggactacgcggtggagagagggtttgagctccaggatgcagcggcagcgccatgaagagtgcgcgatcgcagttggtactgaacattggagcaagtgacctgtacatggttcttgagaatgggtgagaagctccatttgccaaaattatagtccctctgctatagatgcttagacgcttgaattcgtaatttggctagataatcatccgtagagttctcacccctgatacagatgttcagaacttcgaacttggggttgatgtctcggttgaagttttgtagtacgttggtaaaagaaaaaaagtgtccattggccc

SEQ ID NO: 68 - protein, 342 aa, Panicum virgatum
  misc_feature (69)..(329): Pfam name: polyprenyl_synt Pfam desc: Polyprenyl synthetase
  misc_feature: Ceres Clone ID no. 1819213
  misc_feature: Bit score of 230.8 for HMM based on sequences of Figure 1
  misc_feature: Functional Homolog Of Ceres Clone ID no. 29678 at SEQ ID NO. 2
MALSSIFLPLPLPKLLSSSRSHRLLPVRASSDAPAASASFDLRRYWTTLIADVESELDAAMPMRPPESIHAAMRYAVLPGAGKEGPAKRAPPVLCVAACELLGAPRSAALPAAAALEMLHAASLVHDDLPCFDAAPTRRGRPSTHAAFGTDMAVLAGDALFPLAYTHIIAHTPSPDPVPHAVLLRVMAELARAVGSTGMAAGQFLDLAGATALGEAEVMQVLTKKFGEMAECSAACGAMLGGAGPDEEAALRRYGRTIGVLYELVDDLRSASGNGKMRSNASVLRALGMDRALGIVEELKAQAKTEADRFADKYGDRVLPLYSFVDYAVERGFELQDAAAAP

SEQ ID NO: 69 - protein, 367 aa, Gentiana lutea
  misc_feature (101)..(363): Pfam name: polyprenyl_synt Pfam desc: Polyprenyl synthetase
  misc_feature: Public GI ID no. 18146809
  misc_feature: Bit score of 580.7 for HMM based on sequences of Figure 1
  misc_feature: Functional Homolog Of Ceres Clone ID no. 29678 at SEQ ID NO. 2
MVDSWVVQSHSVFHTPISLFRSFLGFLCKPMNYNKIGSNLIEKKKLISSFSVASLITKEEEAMGGPKASNYFDFKAYLIEKANKVNEALDQAVSVKNPPMIHEAMRYSLLAGGKRVRPILCIAACELVGGEESNSVPAACAVEMIHTMSLIHDDLPCYGQRDLRRGKAHETTKSSCEDVAVLAGDSLLAFSFEYIATATKNVSPAKNFSRSRRISKSIGTEGLVAGQVADFVINGENQMFGLDQLEFIHIHKTAALLEAAVVLGAILGGGNPEEVEKLRRFARCIGLLFQVVDDILDVTKSSEELGKTAGKRSCGGKTTYPKLMGLDGAREFADKLNKDAKNQLSEFDREKAAPLLALADYIAYRQN

SEQ ID NO: 70 - protein, 359 aa, Plectranthus barbatus
  misc_feature (95)..(355): Pfam name: polyprenyl_synt Pfam desc: Polyprenyl synthetase
  misc_feature: Public GI ID no. 41059107
  misc_feature: Bit score of 675.3 for HMM based on sequences of Figure 1
  misc_feature: Functional Homolog Of Ceres Clone ID no. 29678 at SEQ ID NO. 2
MSLIASPFPTWPLTKLKKPPTNSNLFSSTTKSIRRPSWEFLIPTRPSATVAVLVKEDSNKFSLNNFDFEAYMKEKAERVNRALDAAVAQREPRWIHESMRYSLLAGGKRVRPLLCIASCELVGGDERTAMPAACATEMIHTMSLIHDDLPCMDNDDLRRGKPTNHKVYGENVAVLAGDALLALAFEHVAAATEGVAPERVVRAVVEFGRYIGSEGLVGGQVVDIHSEGLAEVGVEQLEYIHLHKTAALLEAAVVMGAILGGADDEAVEKLRKFARCIGLLFQVVDDILDVTKSSEELGKTAGKDLLTDKTTYPKLLGLEKSREFAEKLRADACDQLVGFDPARAAPLIALANYIAYRNN

SEQ ID NO: 71 - protein, 345 aa, Chrysanthemum x morifolium
  misc_feature (82)..(341): Pfam name: polyprenyl_synt Pfam desc: Polyprenyl synthetase
  misc_feature: Public GI ID no. 87299435
  misc_feature: Bit score of 698.7 for HMM based on sequences of Figure 1
  misc_feature: Functional Homolog Of Ceres Clone ID no. 29678 at SEQ ID NO. 2
MILINPTSLFYGASLKPRSTSFIYQTRKSQSVSISALLTKEQQSKHTQLESEFDFKSYMVQKANTVNQALDDAVPIREPKKIHESMRYSLLAGGKRVRPILCLASCELVGGDQISAMPAACAVEMIHTMSLMHDDLPCMDNDDFRRGKPTNHIVYGEEIAVLAGDALLSFAFEHVATATKDVSAERIVRAIGELAKCIGSEGLVAGQVVDICSEGADVGLEHLEFIHLHKTAALLEGSVVLGAIMGGGSDVEVERLRKFVRSIGLLFQVVDDILDVTKSSEELGKTAGKDLVADKTTYPKLLGIEKSREFAEKLNKEAQEQLKEFDIRKAAPLIALANYIAYRDN

SEQ ID NO: 72 - protein, 383 aa, Abies grandis
  misc_feature (118)..(379): Pfam name: polyprenyl_synt Pfam desc: Polyprenyl synthetase
  misc_feature: Public GI ID no. 22535957
  misc_feature: Bit score of 626.3 for HMM based on sequences of Figure 1
  misc_feature: Functional Homolog Of Ceres Clone ID no. 29678 at SEQ ID NO. 2
MAYSCMAASCHGLHFMNIASQECNLKRGIIPSKRLHGISSSLWASNGFQGHLERDLSAYRHLVSSSRCLNTIAMLSNLSEQAKEKATEFDFKEYLHSKAISVNEALERAVPLRYPEKIHEAMRYSLLAGGKRIRPILTIAACELVGGSEELAMPTACAMEMIHTMSLIHDDLPSMDNDDLRRGKLTNHKVFGEGTAVLAGDALLSFAFEHIAVSTRKTVASHRVLRVVSELGKAIGSQGVAGGQVADITSEGDPSVGLETLEWIHIHKTAVLLECAVVSGAIIGGASENEIERTGRYARCVGLLFQVVDDILDVTRSSEELGKTAGKDLVSDKATYPKLMGLEKAKEFADELLDRAKEELSCFNPAKAAPLLGLADYIALRQN

SEQ ID NO: 73 - protein, 381 aa, Abies grandis
  misc_feature (116)..(377): Pfam name: polyprenyl_synt Pfam desc: Polyprenyl synthetase
  misc_feature: Public GI ID no. 22535959
  misc_feature: Bit score of 613.0 for HMM based on sequences of Figure 1
  misc_feature: Functional Homolog Of Ceres Clone ID no. 29678 at SEQ ID NO. 2
MAYSAMATMGYNGMAASCHTLHPTSPLKPFHGASTSLEAFNGEHMGLLRGYSKRKLSSYKNPASRSSNATVAQLLNPPQKGKKAVEFDFNKYMDSKAMTVNEALNKAIPLRYPQKIYESMRYSLLAGGKRVRPVLCIAACELVGGTEELAIPTACAIEMIHTMSLMHDDLPCIDNDDLRRGKPTNHKIFGEDTAVTAGNALHSYAFEHIAVSTSKTVGADRILRMVSELGRATGSEGVMGGQMVDIASEGDPSIDLQTLEWIHIHKTAMLLECSVVCGAIIGGASEIVIERARRYARCVGLLFQVVDDILDVTKSSDELGKTAGKDLISDKATYPKLMGLEKAKEFSDELLNRAKGELSCFDPVKAAPLLGLADYVAFRQN

SEQ ID NO: 74 - protein, 383 aa, Abies grandis
  misc_feature (118)..(379): Pfam name: polyprenyl_synt Pfam desc: Polyprenyl synthetase
  misc_feature: Public GI ID no. 17352451
  misc_feature: Bit score of 632.5 for HMM based on sequences of Figure 1
  misc_feature: Functional Homolog Of Ceres Clone ID no. 29678 at SEQ ID NO. 2
MAYSGMATSYHGLHFMNIATQECNLKRLSIPSRRFHGVSPSLWASNGFQGHLKRELSANSFLVSSSRYSNTIAKFTNLPEKVKEKVIEFDFKEYLRSKAMAVNEALDRAVPLRYPERIHEAMRYSLLAGGKRVRPVLCISACELVGGTEEVAMPTACAMEMIHTMSLIHDDLPCMDNDDFRRGKPTNHKVFGEGTAILAGDALLSFAFEHIAVSTSKSVGTDRILRVVSELGRTIGSQGLVGGQVADITSEGDASVDLDTLEWIHIHKTAVLLECSVMCGAIISGASDNEIERIQRYARSVGLLFQVVDDILDVTKSSKELGKTAGKDLISDKATYPKLMGLEKAKQFASDLLIRAKEDLSCFDPMKAAPLLGLADYIAFRQN

SEQ ID NO: 75 - protein, 361 aa, Stevia rebaudiana
  misc_feature (98)..(357): Pfam name: polyprenyl_synt Pfam desc: Polyprenyl synthetase
  misc_feature: Public GI ID no. 158104429
  misc_feature: Bit score of 667.4 for HMM based on sequences of Figure 1
  misc_feature: Functional Homolog Of Ceres Clone ID no. 29678 at SEQ ID NO. 2
MALVNPTALFYGTSIRTRPTNLLNPTQKLRPVSSSSLPSFSSVSAILTEKHQSNPSENNNLQTHLETPFNFDSYMLEKVNMVNEALDASVPLKDPIKIHESMRYSLLAGGKRIRPMMCIAACEIVGGNILNAMPAACAVEMIHTMSLVHDDLPCMDNDDFRRGKPISHKVYGEEMAVLTGDALLSLSFEHIATATKGVSKDRIVRAIGELARSVGSEGLVAGQVVDILSEGADVGLDHLEYIHIHKTAMLLESSVVIGAIMGGGSDQQIEKLRKFARSIGLLFQVVDDILDVTKSTEELGKTAGKDLLTDKTTYPKLLGIEKSREFAEKLNKEAQEQLSGFDRRKAAPLIALANYNAYRQN

SEQ ID NO: 76 - protein, 365 aa, Daucus carota subsp. sativus
  misc_feature (101)..(361): Pfam name: polyprenyl_synt Pfam desc: Polyprenyl synthetase
  misc_feature: Public GI ID no. 79154586
  misc_feature: Bit score of 656.7 for HMM based on sequences of Figure 1
  misc_feature: Functional Homolog Of Ceres Clone ID no. 29678 at SEQ ID NO. 2
MASVMNLSITHFCSSHLKQKSPSNKLVFHGLNSNPFLKSKPPQNVIPYSSMSISSFHTTKIAMDSSPKPPTFDFKSYMLEKAISVNKALDASVSLQEPVKIHESMRYSLLAGGKRVRPILSIAACELFGGHEAVAMPSACAVEMIHTMSLMHDDLPFMDNDDLRRGKPTNHKVYGESVAVLAGDAMLALAFHLVATETSGVSSSQVVRVIVELAKAIGAEGLVAGQIVDVCSEGDPNLGLKDLEFIHRSKTAALLEGSVVMGAILGGANDEEVEKVRKYARCIGLLFQVVDDILDVTKSSKELGKTAGKDLVADKTTYPKLIGIEKSREFSDELKREAVDQLAGFNSDKAAPLIAMANYIANRDN

SEQ ID NO: 77 - protein, 367 aa, Daucus carota subsp. sativus
  misc_feature (103)..(363): Pfam name: polyprenyl_synt Pfam desc: Polyprenyl synthetase
  misc_feature: Public GI ID no. 79154639
  misc_feature: Bit score of 614.9 for HMM based on sequences of Figure 1
  misc_feature: Functional Homolog Of Ceres Clone ID no. 29678 at SEQ ID NO. 2
MAFIQTNTAHENSLLSKNLLFDHLKNTGKTPSSYCTRHHPMKIQGANAVNSTLVQSVNVQELLTNPRVTPGPEFHFEGYMKTSGKKINKALDEAVPVQKPAIIHEAMRYSLLAGGKRVRPVLCIASCELVGGLESWAMPMACALEMIHTMSLIHDDLPCMDNDDLRRGKPTNHKVYGEETAILAGDALLSLAFEHVADATDMVTPGRVVRAIAELGSAVGSQGLVAGQIMDICNQGKDVDLNDLEYIHVHKTSKLLEASVVCGAILGGGNVIEVERLRKYARCIGLLFQVVDDILDVTKSSAELGKTAGKDLVTDKTTYPKLMGLERAKRFATELVAQAEEELSYFGSSTRVAPLYHLAKYIAYRHN

SEQ ID NO: 78 - protein, 393 aa, Taxus canadensis
  misc_feature (128)..(389): Pfam name: polyprenyl_synt Pfam desc: Polyprenyl synthetase
  misc_feature: Public GI ID no. 4322331
  misc_feature: Bit score of 644.8 for HMM based on sequences of Figure 1
  misc_feature: Functional Homolog Of Ceres Clone ID no. 29678 at SEQ ID NO. 2
MAYTAMAAGTQSLQLRTVASYQECNSMRSCFKLTPFKSFHGVNFNVPSLGAANCEIMGHLKLGSLPYKQCSVSSKSTKTMAQLVDLAETEKAEGKDIEFDFNEYMKSKAVAVDAALDKAIPLEYPEKIHESMRYSLLAGGKRVRPALCIAACELVGGSQDLAMPTACAMEMIHTMSLIHDDLPCMDNDDFRRGKPTNHKVFGEDTAVLAGDALLSFAFEHIAVATSKTVPSDRTLRVISELGKTIGSQGLVGGQVVDITSEGDANVDLKTLEWIHIHKTAVLLECSVVSGGILGGATEDEIARIRRYARCVGLLFQVVDDILDVTKSSEELGKTAGKDLLTDKATYPKLMGLEKAKEFAAELATRAKEELSSFDQIKAAPLLGLADYIAFRQN

SEQ ID NO: 79 - protein, 368 aa, Croton sublyratus
  misc_feature (104)..(364): Pfam name: polyprenyl_synt Pfam desc: Polyprenyl synthetase
  misc_feature: Public GI ID no. 6277254
  misc_feature: Bit score of 717.4 for HMM based on sequences of Figure 1
  misc_feature: Functional Homolog Of Ceres Clone ID no. 29678 at SEQ ID NO. 2
MSSVNLGSWVHTSSVISQATRSRSKSKPLSFSPVSIPLFYRNSKRSVSYVSAIVTKDEETIQEEQNKNSSSSLGFDFKSYMVQKASAINQALEAAVSLREPLKIHESMRYSLLAGGKRVRPALCLAACELVGGDESMAMPAACAVEMIHTMSLIHDDLPCMDNDDLRRGKPTNHIVFGENVAVLAGDALLAFAFEHIAVSTLNVSPVRIVRGVGELAKAIGAEGLVAGQVVDICSEGLSEVDLEKLEFIHIHKTAKLLEGAVVLGAIMGGGTDEEVEKLRKYARDIGLLFQVVDDILDVTKSSQELGKTAGKDLVADKVTYPKLMGIEKSREFAEKLNKEAQEQLAGFDPEKAAPLIALANYIAYRQN

SEQ ID NO: 80 - protein, 351 aa, Scoparia dulcis
  misc_feature (87)..(347): Pfam name: polyprenyl_synt Pfam desc: Polyprenyl synthetase
  misc_feature: Public GI ID no. 6277256
  misc_feature: Bit score of 695.5 for HMM based on sequences of Figure 1
  misc_feature: Functional Homolog Of Ceres Clone ID no. 29678 at SEQ ID NO. 2
MSLVNPVSTWPNPTRSSVFRPKPAILNTTHLPISFLFAGKPISAVLTKEYSHQTSSTFDFKKYMLEKASSVNKALESAVSLKEPLKIHESMRYSLLAGGKRVRPMLCLAACELVGGHPSTAMPAACSIEMIHTMSLMHDDLPCMDNDHLRRGHPTNHIVFGEDVAVLAGDALLAYSFEYLATATEGVLPERIVRVIAELAKCIRSEGLLAGQVVDICSEGVSEIGLEHLEYIHLHKTAALLEGSVVLGAILGGGNDEEVERLRKFARCIGLLFQVVDDILDVTKTSVELGKTAGKDLVADKTTYPKLIGIEKSREFAEKLNREAQEQLVGFDSDKAAPLIALANYIAYREN

SEQ ID NO: 81 - protein, 364 aa, Adonis palaestina
  misc_feature (100)..(360): Pfam name: polyprenyl_synt Pfam desc: Polyprenyl synthetase
  misc_feature: Public GI ID no. 56122554
  misc_feature: Bit score of 690.6 for HMM based on sequences of Figure 1
  misc_feature: Functional Homolog Of Ceres Clone ID no. 29678 at SEQ ID NO. 2
MATITSSPLHFFSWSYNHGTLTPRSIPSTCFIFHNKPVSPKSTKPLSFKTPISSVYLTNTENKGKDKEMTFDFKAYLLEKGKSVNQALDNAILIREPEKIHEAMRYSLLAGGKRVRPILCIAASELVGGNESMAMPSACAVEMIHTMSLIHDDLPCMDNDDLRRGKPTNHKVYGENVAVLAGDALLAFAFEYVANATVGVSPSRVVRAIGELAKDIGSEGLVAGQVVDILSAGMSNIGLDHLEFIHLHKTAALLEASVVIGAILGGGTDEQVERLRKFARCIGLLFQVVDDILDVTMSSEELGKTAGKDLVADKATYPKLLGLEKAREFAEKLKNEAIEQLDEFDPEEAAPLLALAEYIAHRQN

SEQ ID NO: 82 - protein, 359 aa, Adonis palaestina
  misc_feature (96)..(355): Pfam name: polyprenyl_synt Pfam desc: Polyprenyl synthetase
  misc_feature: Public GI ID no. 56122559
  misc_feature: Bit score of 603.5 for HMM based on sequences of Figure 1
  misc_feature: Functional Homolog Of Ceres Clone ID no. 29678 at SEQ ID NO. 2
MASFASLCPHESFTHQLKRLPTLSPPLKLTRVSHSHRRMLQFPSAAMKATVTKGMIAETQSYKESAFQFEEYMAEMAERVNQALDDSVPLRHPLKIHEAMRYSLLAGGKRVRPILCIASCELVGGDPVAAHPIACALEMIHTMSLIHDDLPCMDNDDFRRGMPTNHKAFGEETAVLAGDALLSLAFEHVATRSTGVSADRVVRVIAELGKCVGSDGLVGGQIVDIASAGKQIELSELEYIHLHKTAILLEASVVCGAIMGGGMAPDIERLRKYARYIGLLFQVVDDILDVTKSSEELGKTAGKDLATDKATYPKLMGIDKAKEFADALVAQAHKELDYYDFAKAAPLYHFADYIAYRQN

SEQ ID NO: 83 - protein, 364 aa, Cistus incanus subsp. creticus
  misc_feature (100)..(360): Pfam name: polyprenyl_synt Pfam desc: Polyprenyl synthetase
  misc_feature: Public GI ID no. 20386366
  misc_feature: Bit score of 711.9 for HMM based on sequences of Figure 1
  misc_feature: Functional Homolog Of Ceres Clone ID no. 29678 at SEQ ID NO. 2
MTTVSISSWVQTYCVFNQATRSRSRSRSPSFNRFNLPIIPVSKPFRFFRPSNRLGTHQRRRIEQDPPKWAFDLKSYMIQKANSVNQALETAVSLREPLKIHEAMRYSVLAGGKRVRPVLCIAACELVGGEESMAMPAACAVEMIHTMSLIHDDPPCMDNDDLRRGKPTNHKVFGEDIAVLAGDALLAFSFEHMTGSTVGVSPARIVRAVGELAKSIGSEGLVAGQVVDICSEGLTDVGLEHLEFIHVHKTAALLEGSVVLGAILGGGSDEEVEKLRKFARCIGLLFQVVDDILDVTKSSTELGKTAGKDLVADKVTYPKLMGIEKSREFAEELKNDAVEQLRGFDQEKAAPLIALANYIAYRQN

SEQ ID NO: 84 - protein, 369 aa, Cistus incanus subsp. creticus
  misc_feature (105)..(365): Pfam name: polyprenyl_synt Pfam desc: Polyprenyl synthetase
  misc_feature: Public GI ID no. 20386368
  misc_feature: Bit score of 685.0 for HMM based on sequences of Figure 1
  misc_feature: Functional Homolog Of Ceres Clone ID no. 29678 at SEQ ID NO. 2
MSTVNVNLGSWSQPTCFVFNQKTRSRIPNFSSFKGFMASSSNFRSVSSSSSSSSSFIASVLSGKDTMKGEEENSGFDFQSYMDQMADSVNQALESAVSLREPLKIHEAMRYSLLAGGKRVRPLLCIAACELVGGDVSVAMPAACAVEMIHTMSLIHDDLPCMDNDDLRRGKPTNHKAFGEDIAVLAGDALLSFAFEHVAVSTVGASPDKIVRAVGELAKAVGKEGLVAGQVVDITSEGLNDVGLDHLEYIHVHKTAVLLEAAVVLGAILGGGTDEEVERLRKFAICIGLLFQVVDDILDVTKSSVELGKTAGKDLVADKVTYPKLMGLEKSREFAEKLRDDAVEQLRVFDQVKAAPLIALAHYIAYRQN

SEQ ID NO: 85 - protein, 371 aa, Picrorhiza kurrooa
  misc_feature (107)..(367): Pfam name: polyprenyl_synt Pfam desc: Polyprenyl synthetase
  misc_feature: Public GI ID no. 58201026
  misc_feature: Bit score of 703.7 for HMM based on sequences of Figure 1
  misc_feature: Functional Homolog Of Ceres Clone ID no. 29678 at SEQ ID NO. 2
MSLVNSITWSQTSSILNIQSNISKKLTPFSILPHPLTNNLPISLFPNPKSNISNSNTPLSAILTKDQKPQNPPTTPTFDFKSYMLQKADSVNKALDDSIPLTEPLKIQESMRYSLLAGGKRIRPMLCIAACELVGGDESTAMPAACAVEMVHTMSLMHDDLPCMDNDDLRRGKPTNHKVFTEDVAVLAGDAMLAFSFEHVASLTKGVCSERIVRVIYELAKCVGCEGLVAGQVVDICSEGMDEVGLEHLEFIHLNKTAALLEGSVVLGAILGGGSDEEVEKLRNFARCIGLLFQVVDDILDVTKSSKELGKTAGKDLVADKTTYPKLIGIEKSKEFAERLNREAKEHLAGFDQNKAAPLIALADYIAYRDN

SEQ ID NO: 86 - protein, 338 aa, Arnebia euchroma
  misc_feature (73)..(334): Pfam name: polyprenyl_synt Pfam desc: Polyprenyl synthetase
  misc_feature: Public GI ID no. 88910043
  misc_feature: Bit score of 548.2 for HMM based on sequences of Figure 1
  misc_feature: Functional Homolog Of Ceres Clone ID no. 29678 at SEQ ID NO. 2
MHNLRAHVKKWIQLSSIFSCSSKSIYMSSRVNVFEIEEEPRSRFDFKSYMINKITSINEALDSAVPLIEPIKLHEAMRYTLLSGGKRVRPIVCIAACELVGGHESTVMPTACAQEMIHSMSVMLDDLPCMDNDDFRRGKLSNHRVYGEKITLLAVRSLQALAVDHVVTATRGVPPERLVRALTEMAILTGSKGAAAGQIADLCSSGEDFNVSIEQLEHIHMQKTGTLCEGSVVSGAIIGGASEEEIEKLRKFSKCIGLMFQIVDDVLDVTKSSMELGKPAGKDVVAAKATYPRLIGIEKSRELALKLNSEAKEQLSGFDQEKAAPLIALADYIVARQN

SEQ ID NO: 87 - protein, 312 aa, Ostreococcus lucimarinus CCE9901
  misc_feature (46)..(308): Pfam name: polyprenyl_synt Pfam desc: Polyprenyl synthetase
  misc_feature: Public GI ID no. 145352919
  misc_feature: Bit score of 540.3 for HMM based on sequences of Figure 1
  misc_feature: Functional Homolog Of Ceres Clone ID no. 29678 at SEQ ID NO. 2
MGRVRAVSATPDVSSEQEFNAYIKNVNAEIERALDASVPMHYPERLSESMRYSLLAGGKRIRPALCLAACELVGGTMEVAMPTACALEMIHTMSLIHDDLPSMDNDDFRRGKPTNHKVYGEEMAILAGDALLSHAFEYIGRETKGVSADKVLRVIVDVGKCVGSEGLVGGQVVDIMSEGADEGTVTIDTLKYIHAHKTGALLEVSVTAGAILGGASEEQIGKLERYAQNIGLAFQVVDDILDCTATSEELGKTAGKDMAVGKSTYPSLVGMEESKRIAADLISKAKQELEGFDPVKVKPLIGLADYIQNRKN

SEQ ID NO: 88 - protein, 315 aa, Synechococcus sp. RS9917
  misc_feature (49)..(311): Pfam name: polyprenyl_synt Pfam desc: Polyprenyl synthetase
  misc_feature: Public GI ID no. 87124785
  misc_feature: Bit score of 500.8 for HMM based on sequences of Figure 1
  misc_feature: Functional Homolog Of Ceres Clone ID no. 29678 at SEQ ID NO. 2
MTAAATSPDSAPPAGAAQGFDFNAYLAARKAEVESALDASLPPERPESLREAMRYSLLAGGKRLRPILCLAACELAGGDPALAMPTAVALEMIHTMSLIHDDLPAMDDDDLRRGRPTNHKVYGEAVAILAGDALLTRAFEMVALRSPGVPAERLLQVVAELSLVAGAPGLVGGQVVDLESEGKQVDLETLEYIHLHKTGALLRACVITGALIAGADASRIDSLRTYARGIGLAFQIVDDILDVTASSDVLGKTAGKDLIADKTTYPKLLGLEESRQRAKALVEEAKASLAAFKPTEPAKASPLLALADYVIGRDR

SEQ ID NO: 89 - protein, 315 aa, Synechococcus sp. WH7805
  misc_feature (53)..(311): Pfam name: polyprenyl_synt Pfam desc: Polyprenyl synthetase
  misc_feature: Public GI ID no. 88808953
  misc_feature: Bit score of 506.7 for HMM based on sequences of Figure 1
  misc_feature: Functional Homolog Of Ceres Clone ID no. 29678 at SEQ ID NO. 2
MFFMTATARSPEGLMPSGENQADFDFSAYLAKTRNLVEGALDAALGPERPESLRESMRYSLLAGGKRLRPILCLAACELVGGDASLAMPTAVALEMIHTMSLIHDDLPAMDNDDLRRGRPTNHKVYGDAMAILAGDALLSRAFEMVSLRSPGVPPERLLKVVAELALVSGAPGLVGGQVVDLESEGREVDLETLEYIHLHKTAALLRACVVTGALIGGADANQVEAMRTYANGIGLAFQIVDDILDVTASSEVLGKTAGKDLIADKTTYPKLLGLEPSRARALELVAQAKSALEPWTSKAQPLLALADYVASRDR

SEQ ID NO: 90 - protein, 307 aa, Thermosynechococcus elongatus BP-1
  misc_feature (44)..(303): Pfam name: polyprenyl_synt Pfam desc: Polyprenyl synthetase
  misc_feature: Public GI ID no. 22297564
  misc_feature: Bit score of 485.3 for HMM based on sequences of Figure 1
  misc_feature: Functional Homolog Of Ceres Clone ID no. 29678 at SEQ ID NO. 2
MISADPPQVHPAGTFDLKAYLKERQALVEAALEASIPVAYPEKIYDAMRYSLMAGGKRLRPILCLATCELMGGTVEMAMPTACALEMIHTMSLIHDDLPAMDNDDYRRGKPTNHKVYGEDIAILAGDGLLAYAFEYVVEQTKNVPAEYLLKIVARLGHAVAATGLVGGQVVDLECEGQPDIGLETLHFIHSHKTGALLEASVVSGALLTGAHESDVARLSRYAANIGLAFQIVDDILDITSTRDVLGKTVGKDVAAQKMTYPRLWGLEKSRQEAERLVAEAKAELAVYGAAAVPLQAIADYITSRSH

SEQ ID NO: 91 - protein, 302 aa, Synechocystis sp. PCC 6803
  misc_feature (39)..(298): Pfam name: polyprenyl_synt Pfam desc: Polyprenyl synthetase
  misc_feature: Public GI ID no. 16329282
  misc_feature: Bit score of 478.6 for HMM based on sequences of Figure 1
  misc_feature: Functional Homolog Of Ceres Clone ID no. 29678 at SEQ ID NO. 2
MVAQQTRTDFDLAQYLQVKKGVVEAALDSSLAIARPEKIYEAMRYSLLAGGKRLRPILCITACELCGGDEALALPTACALEMIHTMSLIHDDLPSMDNDDFRRGKPTNHKVYGEDIAILAGDGLLAYAFEYVVTHTPQADPQALLQVIARLGRTVGAAGLVGGQVLDLESEGRTDITPETLTFIHTHKTGALLEASVLTGAILAGATGEQQQRLARYAQNIGLAFQVVDDILDITATQEELGKTAGKDVKAQKATYPSLLGLEASRAQAQSLIDQAIVALEPFGPSAEPLQAIAEYIVARKY

SEQ ID NO: 92 - protein, 306 aa, Prochlorococcus sp. MIT9313
  misc_feature (44)..(302): Pfam name: polyprenyl_synt Pfam desc: Polyprenyl synthetase
  misc_feature: Public GI ID no. 33863380
  misc_feature: Bit score of 490.6 for HMM based on sequences of Figure 1
  misc_feature: Functional Homolog Of Ceres Clone ID no. 29678 at SEQ ID NO. 2
MNETRFMAAAVSTFFDFPAYLAAAKASVEEALDDSLGPERPEQLREAMRYSLLAGGKRLRPILCLAACELAGGEPAEALPTAVALEMIHTMSLIHDDLPAMDNDDLRRGRPTNHKVYGDAVAILAGDALLTRSFEMVALRSPGVPPERLLKVVGELSLVAGAPGLVGGQVVDLECEGKEVDLETLEFIHLHKTGALLSACVICGALIGGAEDDLIDALRIYARGIGLAFQIIDDILDVTASSDVLGKTAGKDLLADKTTYPKLLGLDESRRRAELLVSEAKAALEPWQASAAPLLALADYITSRDR

SEQ ID NO: 93 - protein, 296 aa, Synechococcus sp. CC9902
  misc_feature (34)..(292): Pfam name: polyprenyl_synt Pfam desc: Polyprenyl synthetase
  misc_feature: Public GI ID no. 78184316
  misc_feature: Bit score of 476.3 for HMM based on sequences of Figure 1
  misc_feature: Functional Homolog Of Ceres Clone ID no. 29678 at SEQ ID NO. 2
MTAEFDFKAYLGKAKDTVEAALDDSLGPERPESLRDAMRYSLLAGGKRLRPILCLAACELAGGEAKHAVPTAVALEMIHTMSLIHDDLPAMDDDDVRRGRPTNHKVYGEAVAILAGDALLTRAFEMVALRSPGVPAERLLKVVGELSLVAGAPGLVGGQVVDLESEGKQVDLETLEYIHLHKTGALLSACVITGALIGNADDTLITALRTYARGIGLAFQIIDDILDITASSEVLGKTAGKDLLADKTTYPKLLGLEESRKRADDLVREAKEALQPWSEQAMPLLALADFITSRDR

SEQ ID NO: 94 - protein, 287 aa, Lyngbya sp. PCC 8106
  misc_feature (24)..(283): Pfam name: polyprenyl_synt Pfam desc: Polyprenyl synthetase
  misc_feature: Public GI ID no. 119489387
  misc_feature: Bit score of 468.2 for HMM based on sequences of Figure 1
  misc_feature: Functional Homolog Of Ceres Clone ID no. 29678 at SEQ ID NO. 2
MAERKAEVEQALDRSIAVIYPEKIYEAMRYSLLAGGKRLRPILCLATCELAGGTMEMAMPTACSLEMIHTMSLIHDDLPAMDNDDYRRGQLTNHKVYGEDIAILAGDGLLSYAFEFVATQTTNVPPQQVLDVIGHLGRAVGAAGLVGGQVVDVESEGKTDITEEQLTFIHTHKTGALLEACVVSGAILAGTSTENRERLSRYAQKIGLAFQIVDDILDITATQEELGKTAGKDLTAQKATYPSLWGLEESKRRANQLIAEAQAELAPFGEAATPLVALAQFITSRSN

SEQ ID NO: 95 - protein, 299 aa, Prochlorococcus marinus str. NATL1A
  misc_feature (37)..(295): Pfam name: polyprenyl_synt Pfam desc: Polyprenyl synthetase
  misc_feature: Public GI ID no. 124026221
  misc_feature: Bit score of 472.3 for HMM based on sequences of Figure 1
  misc_feature: Functional Homolog Of Ceres Clone ID no. 29678 at SEQ ID NO. 2
MQEAIASFDFAEYLEKARTRVEDALGASLGPEKPEKLRESMRYSLLAGGKRLRPILCLAACELAGGELEKALPTAVALEMIHTMSLIHDDLPSMDNDDLRRGRPTNHKVYGDAVAILAGDALLTRAFEMVSIRTEGIPSERLLKIIGELSLAAGAPGLVGGQVVDLDCEGKEVDLETLEYIHLHKTGALLKACVTCGALIGGADEKLLDALSIYARGIGLAFQIIDDILDVTASSEVLGKTAGKDLIADKTTYPKLLGLDESRRRADLLVAKAKSALDPWPEKSKPLLALADYITSRDR

SEQ ID NO: 96 - protein, 309 aa, Microcystis aeruginosa PCC 7806
  misc_feature (46)..(305): Pfam name: polyprenyl_synt Pfam desc: Polyprenyl synthetase
  misc_feature: Public GI ID no. 159030944
  misc_feature: Bit score of 481.1 for HMM based on sequences of Figure 1
  misc_feature: Functional Homolog Of Ceres Clone ID no. 29678 at SEQ ID NO. 2
MVTRGERGVEVRKNENFSLASYLEEKRLIVESALDSSLVIGNPAKIYEAMRYSLLAGGKRLRPILCLATCELMGGSLEMALPTACALEMIHTMSLIHDDLPAMDNDDYRRGKLTNHKVFGEDIAILAGDGLLAYAFEYVATQTLNVPPLQILEVIARLGRTVGAAGLVGGQVLDLESEGKPDISAETLGFIHTQKTGALLETSVVSGAVLAGAKGEDIAKLARYAQNIGLAFQIIDDVLDITATKEELGKTAGKDLQAQKATYPSLWGIEGSRQQAQHLIDSAINELSSYDEAAEPLRAIAEYIVNRKN

SEQ ID NO: 97 - protein, 300 aa, Cyanophora paradoxa
  misc_feature (37)..(296): Pfam name: polyprenyl_synt Pfam desc: Polyprenyl synthetase
  misc_feature: Public GI ID no. 11467424
  misc_feature: Bit score of 456.5 for HMM based on sequences of Figure 1
  misc_feature: Functional Homolog Of Ceres Clone ID no. 29678 at SEQ ID NO. 2
MKPLQTNFNLLTYLYERKEIVEDTLNKSIPRGNPTFIYDSIRYSLSAGGKRIRPILCLASCELAGGTMEMALPTACALEMIHTMSLIHDDLPAMDNDSYRRGKPTNHIIYGEDLAILAGDALLAYAFEFIATQTKNVPADLIVKVIAQVAHSVTTSGLVGGQIIDLSSEGKSDTTLETLNFIHIHKTGALLEAAVLSGALLAGAKEKDMNRFLRYAQNIGLAFQIIDDVLDIISTEEKLGKSIGKDLKTQKATYPSFWGVEESIKQAELLVEEAKEEILYFDNKAIPLIAIADFIVNRNN

SEQ ID NO: 98 - protein, 299 aa, Prochlorococcus marinus str. MIT 9301
  misc_feature (37)..(295): Pfam name: polyprenyl_synt Pfam desc: Polyprenyl synthetase
  misc_feature: Public GI ID no. 126696514
  misc_feature: Bit score of 448.2 for HMM based on sequences of Figure 1
  misc_feature: Functional Homolog Of Ceres Clone ID no. 29678 at SEQ ID NO. 2
MTKVINSYDFEKYLKQTKKVIEEALDFSLGPENPEILRESMRYSLLAGGKRIRPILCLASCSLAGGEPSLAVPTAVAIEMIHTMSLIHDDLPAMDNDDLRRGRPTNHKVYGDAVAILAGDALLTRAFEMVSLRSPGVDPNRLLNVIGELSLVAGAPGLVGGQVVDLECEGKEVDLDTLEYIHLHKTGALLKACVRTGAMIAGANEKLLQALTTYAEGIGLAFQIIDDILDLTSSSEKLGKTAGKDLLADKTTYPKLLGMEESKKRAFDLVEKAKKAIEPWGADANHLISLADFITNRDR

SEQ ID NO: 99 - protein, 295 aa, Geobacter bemidjiensis Bem
  misc_feature (32)..(291): Pfam name: polyprenyl_synt Pfam desc: Polyprenyl synthetase
  misc_feature: Public GI ID no. 145620854
  misc_feature: Bit score of 402.9 for HMM based on sequences of Figure 1
  misc_feature: Functional Homolog Of Ceres Clone ID no. 29678 at SEQ ID NO. 2
MDLKQYLKQKCELVDQALERFLPHGKELPASLHGSMRYSVFAGGKRVRPVLLLAACEAVGGELNSALPAACAMEMIHTYSLIHDDLPAMDNDDFRRGNPTNHKVYGEATAILAGDALLTEAFILLSCNGEGMEPGARLRVIHEIAHASGSRGMVGGQMVDMESEGKHDIDMATLSYIHTHKTGALIRASVRAGAILGGANEETFDALTRYADAIGLAFQIADDVLDVEGTTEELGKDAGSDQARGKATYPALVGLEASKRRAEELVQIALNALEPFDERAEPLRAIASYIVKRKS

SEQ ID NO: 100 - protein, 300 aa, Prochlorococcus sp. CCMP1378
  misc_feature (38)..(296): Pfam name: polyprenyl_synt Pfam desc: Polyprenyl synthetase
  misc_feature: Public GI ID no. 33861626
  misc_feature: Bit score of 440.6 for HMM based on sequences of Figure 1
  misc_feature: Functional Homolog Of Ceres Clone ID no. 29678 at SEQ ID NO. 2
MTEVINNIPDFEKYLTDTKKVVEEALDFSLGPENPEILRESMRYSLLAGGKRIRPILCLASCSLAGGEPSLAVPTAVAIEMIHTMSLIHDDLPAMDNDGFRRGRPTNHKVYGDAIAILAGDALLTRAFEMVSLRSPGVDSNRLLNVVGELSLVAGAPGLVGGQVVDLECEGKEVDLETLEYIHLHKTGALLKASVRTGAMIAGANEELLNALTTYAEGIGLAFQIIDDILDLTSSSEKLGKTAGKDLLADKTTYPKLLGMEESKKKAFDLVDQAKKAIEPWGLNAKYLISLADFITNRDR

SEQ ID NO: 101 - protein, 297 aa, Geobacter sp. FRC-32
  misc_feature (32)..(293): Pfam name: polyprenyl_synt Pfam desc: Polyprenyl synthetase
  misc_feature: Public GI ID no. 110599112
  misc_feature: Bit score of 388.8 for HMM based on sequences of Figure 1
  misc_feature: Functional Homolog Of Ceres Clone ID no. 29678 at SEQ ID NO. 2
MDLKSYLKERCQLVDDALNRFLPLADDLPASLHKSMRYSIFAGGKRIRPILMLAACEAVGGNISQAMPAACAMEMIHTYSLIHDDLPAMDDDDFRRGNPTNHKVFGEAVAILAGDALLTEAFILLSNLAAAPTVPPAALVQVIQEISCCAGSRGMVGGQVVDMESEGNAEIDLATVQYIHTHKTGALIKASVKSGALLGGASSKDAESLTRYGEAIGLAFQIADDILDIEGTTEEIGKDAGSDEARGKATYPAVMGLAEAKIRAAELVDIALDALSAFDGKADPLREIASYIVKRKS

SEQ ID NO: 102 - protein, 294 aa, Magnetococcus sp. MC-1
  misc_feature (32)..(290): Pfam name: polyprenyl_synt Pfam desc: Polyprenyl synthetase
  misc_feature: Public GI ID no. 117924356
  misc_feature: Bit score of 344.5 for HMM based on sequences of Figure 1
  misc_feature: Functional Homolog Of Ceres Clone ID no. 29678 at SEQ ID NO. 2
MELKPYLADRKYLVESALDRLLPAADREPRALTGAMRYSLLIGGKRLRPILTLACCEAVGGALERAMNFACAMECVHTYSLIHDDLPAMDNDDLRRGHPTCHRQYGEATAILAGDALLTHAFELAAKPVTGVLPEARLELIGELAMAAGTYGMVGGQMLDIQGEKRPLELVQLQNIHIHKTGALIRVACLAGARLGGGTPDQVKHLKRYGEALGLAFQITDDILDEVGDTKTLGKATGVDRALDKATYPKLMGLAQAREAAENLMQEATRCLTEFGPQADPLRALAQYVIARTH

SEQ ID NO: 103 - protein, 297 aa, Geobacter sulfurreducens PCA
  misc_feature (32)..(293): Pfam name: polyprenyl_synt Pfam desc: Polyprenyl synthetase
  misc_feature: Public GI ID no. 39996864
  misc_feature: Bit score of 376.6 for HMM based on sequences of Figure 1
  misc_feature: Functional Homolog Of Ceres Clone ID no. 29678 at SEQ ID NO. 2
MDLKGYLKERCALVDEALERHLPAEDELPSSVHRAMRYSVFAGGKRVRPILMLAACDAVGGDTALALPAACAMEMIHTYSLIHDDLPAMDDDDFRRGRPTNHKVFGEAIAILAGDALLTEAFILISSPSYAAAVGSDRLLPVIHEIALCAGSRGMVGGQVVDMESEGNKEIDLATVQYIHTRKTGALIKASIKAGAVLGGANADAVKAVTRYGEAIGLAFQIADDILDIEGTTEQIGKDAGSDEARGKATYPAVLGLAESKRRAQELLDLAIEALSPFDHRADPLREIARYIVSRKS

SEQ ID NO: 104 - protein, 296 aa, Pelobacter carbinolicus DSM 2380
  misc_feature (32)..(296): Pfam name: polyprenyl_synt Pfam desc: Polyprenyl synthetase
  misc_feature: Public GI ID no. 77919267
  misc_feature: Bit score of 360.2 for HMM based on sequences of Figure 1
  misc_feature: Functional Homolog Of Ceres Clone ID no. 29678 at SEQ ID NO. 2
MDLNAYLKERRAQVDKALDTYLPGEDVLPISLHKAMRYSTFAAGKRIRPILMMAACEAVGGTVDKVMPAACAMEMIHTYSLIHDDLPAMDDDDFRRGRPTCHKVYGDALAILAGDALLTEAFILLSRLGEDGGVSLEAARRVSADIARCAGSMGMVGGQVVDMDSEGKEIDLATLEYIHTRKTGALILASVQSGAVLGGASSEQVDNLGRYAKAAGLAFQVADDILDIVGDQELLGKDVGSDQERGKATYPALLGLDAARDRAKELRDVALESLSGFDERAEPLRSIAHYIVDRSF

SEQ ID NO: 105 - DNA, 1181 bp, Arabidopsis thaliana
  misc_feature: Ceres Clone ID no. 33232
  misc_feature: Encodes the peptide sequence at SEQ ID NO. 106
attttatctgattctgggtctgttgaaaatcaaaattttcttgagaactttttttgaagagttatgattgcattagctgcttcttcgttggggaatacaccgattgcttcgtttaaccgtcattttagattccggttacatccacgaaaccctctgatacaagcagcggtttcaccttcgtcttcttcttcttctcctactgcttcatctggctttgatttgagttctctcgaatccgccattaacaagaaagatagtaatggtgttaaggaagctctcgataaattgagtgaagaaggttgggctaagaaatggagctcccagccgtatctttcgcgccgtacgacatcactgcgggagctgacaactctcggtatcaagaatgcagagactctggccattcctagtgtcaggaacgatgcggcttttcttttcacagtagtcggatcaactgggttcatagctgtacttgccggccaacttcccggggactggggattctttgtgccttacttagttgggagcatttcgttggtagttttagccatgggaagcgtttcaccagggcttcttcaagctgcgatttccgggttttcgacgttcttccctgattatcaagaacgaattgctgcacatgaagcagcccacttcttagtggcttacttaatcgggcttccaatcctcgggtactcgttagacatcggtaaagaacatgtcaatctcattgacgagagactagctaaactaatatacagcggcaagcttgactcaaaggagctcgataggttggctgctgttgcaatggctggacttgccgccgagggtctgaagtatgacaaagtaattggccaatctgcagatctcttctctcttcagagattcataaacagaagccaacccaaaatcagcaacgagcagcagcaaaatctaacaagatgggctgttctttactctgcttctcttctcaaaaacaacaagaccatccatgaagctctaatggctgcaatgtccaaaaatgcatctgttcttgaatgcattcaaaccattgagacagcttcctagatgaacaatctctgttatctctttaatcgatacaactacgtcccataacaacactcaattgtttcacatgaacttccatatcttttatatatataaagacacaaaagttacagactttc

SEQ ID NO: 106 - protein, 332 aa, Arabidopsis thaliana
  misc_feature: Ceres Clone ID no. 33232
  misc_feature: in Figure 2
  misc_feature: Bit score of 736.5 for HMM based on sequences of Figure 2
  misc_feature (224)..(224): Xaa is any aa, unknown, or other
  misc_feature (235)..(235): Xaa is any aa, unknown, or other
  misc_feature (243)..(243): Xaa is any aa, unknown, or other
  misc_feature (297)..(297): Xaa is any aa, unknown, or other
MIALAASSLGNTPIASFNRHFRFRLHPRNPLIQAAVSPSSSSSSPTASSGFDLSSLESAINKKDSNGVKEALDKLSEEGWAKKWSSQPYLSRRTTSLRELTTLGIKNAETLAIPSVRNDAAFLFTVVGSTGFIAVLAGQLPGDWGFFVPYLVGSISLVVLAVGSVSPGLLQAAISGFSTFFPDYQERIAAHEAAHFLVAYLIGLPILGYSLDIGKEHVNLIDEXLAKLIYSGKLXSKELDRLXAVAMAGLAAEGLKYDKVIGQSADLFSLQRFINRSQPKISNEQQQNLTRWAVLYXASLLKNNKTIHEALMAAMSKNASVLECIQTIETAS

SEQ ID NO: 107 - protein, 346 aa, Chlamydomonas reinhardtii
  misc_feature: Public GI ID no. 159472210
  misc_feature: in Figure 2
  misc_feature: Bit score of 743.3 for HMM based on sequences of Figure 2
  misc_feature: Functional Homolog Of Ceres Clone ID no. 33232 at SEQ ID NO. 106
MLLNRQSPAVQHSYHRRASVTGVVRRARLTTAIVRADASTTSVPAVEAKPLYDNLDVACTNYRRAPFSMRIEFSGPVKEAFDDLQGKGVLRKWGSALTDAVRRRNVFIGELRQVGIKSPDTIAIPSVRNDAAFLFSVVATTSVAAVAAGQLPGDWGFFSSYLIGGITLVVLAIGSTAPGLLSVVIDRFSQLFPDYKDRVLKHEAAHFLLGYLVGVPITGYSVELGREHTEFAEAKIQQRIIERQLTDEEIDSLALVAVAGMAAEGREYEEVMGQTADLYDLQRLLLRSKTKLSDAQQQNITRWAVWSAAGLLRSHAEEHKALIEAMRRGASVAECVQVIESAGGSK

SEQ ID NO: 108 - DNA, 954 bp, Populus balsamifera subsp. trichocarpa
  misc_feature: Ceres Annot ID no. 1504045
  misc_feature: Encodes the peptide sequence at SEQ ID NO. 109
atggtttctctgtcaaatactactgcatcaacatacactgcatttcagtgctgtaatcatcaccacaagctgctgcaaataagagcttcttctgctgcacctggtgttgacctcaagacccttgagtctgcacttgctaagaaagacagcaatgctgttaaagaggcacttgatcaactaagggaggttggttgggctaagagatggagctctcagccatatgtctctcgccgtacgacatctctgcgggagctgacgagtcttggaattaagaatgcagagaacctggcaattccaagtgttagaaatgatgcagcttttcttttcacagtggtgggaacaacaggctttttgggagtccttgctggccaacttcctggggattggggtttctttgtgccatacttgattgggagcatttctctagttgtcctggctgtggggagtatttctcctggacttcttcaagctgctattagtggtttctctgcagtttttcctgactatcaggagaggatagctagacatgaagcagctcattttttaattggatacttgattggccttcctatcctggactactcattagatatcgggaaagagcatgtcaatctcattgatgaaaagctggaaaagctgatatatagtgggcagcttgatgctaaggagctagataggttggcggttgtagcaatggctggacttgccgcagagggtctgcaatatgacaaagtggttggccaatctgctgaccttttcactcttcagagatttataaatagaagcaaaccacagatcagcaaagaccagcaacagaatcttactagatgggctgttttatttggcggatctcttattaaaaataacaagtcactccatgaagccctaatgacagcaatgtcgaataaggcgactgtattagaatgcattcaagcgatcgagaaagctgcataa

SEQ ID NO: 109 - protein, 317 aa, Populus balsamifera subsp. trichocarpa
  misc_feature: Ceres Annot ID no. 1504045
  misc_feature: in Figure 2
  misc_feature: Bit score of 755.0 for HMM based on sequences of Figure 2
  misc_feature: Functional Homolog Of Ceres Clone ID no. 33232 at SEQ ID NO. 106
MVSLSNTTASTYTAFQCCNHHHKLLQIRASSAAPGVDLKTLESALAKKDSNAVKEALDQLREVGWAKRWSSQPYVSRRTTSLRELTSLGIKNAENLAIPSVRNDAAFLFTVVGTTGFLGVLAGQLPGDWGFFVPYLIGSISLVVLAVGSISPGLLQAAISGFSAVFPDYQERIARHEAAHFLIGYLIGLPILDYSLDIGKEHVNLIDEKLEKLIYSGQLDAKELDRLAVVAMAGLAAEGLQYDKVVGQSADLFTLQRFINRSKPQISKDQQQNLTRWAVLFGGSLIKNNKSLHEALMTAMSNKATVLECIQAIEKAA

SEQ ID NO: 110 - DNA, 1193 bp, Glycine max
  misc_feature: Ceres Clone ID no. 572174
  misc_feature: Encodes the peptide sequence at SEQ ID NO. 111
aatcaaacagcgtagatagcaaagggataatgtggatgacaaccatggctaactcatctctgcttcccaaaccctattattaccataatttccattatcaacaccaaagatgcttcaagatcaacctcccaaaatggactactagtactagagcttcctctgctgcccctggggtcgacctcaacactctcgaatttgccatttccaagaaagacagtgatgctgttaaagaggcacttaatcagcttagtgaagttggttgggccaagaaatggagttctcagccatatgtttcacgtcgtacgacatcactccgggagctgacaagtctaggcataaaaaactcagagaaccttgcaattcctagtgtcagaaacgatgcagcttttctttttaccgtggttggaacaacaggatttttggctgttcttgctgggcaacttcccggggattggggcttctttgtaccgtacttgattgggagtatctcattagtggttttggctgtgggtagcatatccccagggcttctccaagctgctattggcagcttttcaacactttttcctgattatcaagaaaggattgccaggcatgaagcagctcactttttgattgcttatctgctgggcctacccatttttgattattccctggatattgggaaagaacatgtcaatctcattgatgagaggcttgaaaaacttatctatagtggacagcttgatgccaaagagctagatagattggctgttgtgtcaatggctggactggcagcagaaggtttaacatatgacaaggtggttggtcaatctgctgatcttttcagtctccagagatttattaacagaaccaagccaccactcagcaaagatcagcaacaaaatctcacaagatgggccgttctgtttgctgcttctctcttgaaaaataacaaggtgactcatgaagccttaatggcagcgatgacaaagaaggcaagcgtcctggaatgcattcgggcaatcgaaaatgcagcatagttccacatttatctgttttcagccgagacaccaaaatatagtataaccaaagtctaagaactacaaattacaattttaagttatttcttgtacataatcactcatgattcaagtttttttttcaagagcattcaactttccattatttttgttactcttggtatttgatat

SEQ ID NO: 111 - protein, 328 aa, Glycine max
  misc_feature: Ceres Clone ID no. 572174
  misc_feature: in Figure 2
  misc_feature: Bit score of 773.6 for HMM based on sequences of Figure 2
  misc_feature: Functional Homolog Of Ceres Clone ID no. 33232 at SEQ ID NO. 106
MTTMANSSLLPKPYYYHNFHYQHQRCFKINLPKWTTSTRASSAAPGVDLNTLEFAISKKDSDAVKEALNQLSEVGWAKKWSSQPYVSRRTTSLRELTSLGIKNSENLAIPSVRNDAAFLFTVVGTTGFLAVLAGQLPGDWGFFVPYLIGSISLVVLAVGSISPGLLQAAIGSFSTLFPDYQERIARHEAAHFLIAYLLGLPIFDYSLDIGKEHVNLIDERLEKLIYSGQLDAKELDRLAVVSMAGLAAEGLTYDKVVGQSADLFSLQRFINRTKPPLSKDQQQNLTRWAVLFAASLLKNNKVTHEALMAAMTKKASVLECIRAIENAA

SEQ ID NO: 112 - protein, 326 aa, Solanum lycopersicum
  misc_feature: Public GI ID no. 58198163
  misc_feature: in Figure 2
  misc_feature: Bit score of 605.9 for HMM based on sequences of Figure 2
  misc_feature: Functional Homolog Of Ceres Clone ID no. 33232 at SEQ ID NO. 106
MGSIAAYCGGLLCCSELRSSNSRIVSGLSVLEQVDKELTKGDERAALSLVKDLQGKPGGLRCFGAARQVPQRLYSLDELKLNGIEAISLLSPVDATLGAIERNLQIAAILSGSAAWYALDLSPQQIFFVSLGVLFLWTLDLVSFNGGVGTLVLDTIGHTFSQKYHNRVIQHEAGHFLIAYLLGILPKGYTLTSLDALKKEGSLNIQAGTAFVDLEFIEEVNRGKVTATMLNRFSCIALAGVATEYLLFGYAEGGLSDINQLDALLKSLGFTQKKADSQVRWAVLNTILILRRHEKARSKLAEAMTQGKSVGVCIDIIEKSISDDDL

SEQ ID NO: 113 - DNA, 861 bp, Populus balsamifera subsp. trichocarpa
  misc_feature: Ceres Annot ID no. 1450983
  misc_feature: Encodes the peptide sequence at SEQ ID NO. 114
atggtttctctgtcaaatactactgcatcaacatacactgcatttcagtgctgtaatcatcaccacaagctgctgcaaataagagcttcttctgctgcacctggtgttgacctcaagacccttgagtctgcacttgctaagaaagacagcaatgctgttaaagaggcacttgatcaactaagggaggttggttgggctaagagatggagctctcagccatatgtctctcgccgtacgacatctctgcgggagctgacgagtcttggaattaagaatgcagagaacctggcaattccaagtgttagaaatgatgcagcttttcttttcacagtggtgggaacaacaggctttttgggagtccttgctggccaacttcctggggattggggtttctttgtgccatacttgattgggagcatttctctagttgtcctggctgtggggagtatttctcctggacttcttcaagctgctattagtggtttctctgcagtttttcctgactatcaggagaggatagctagacatgaagcagctcattttttaattggatacttgattggccttcctatcctggactactcattagatatcgggaaagagcatgtcaatctcattgatgaaaagctggaaaagctgatatatagtgggcagcttgatgctaaggagctagataggttggcggttgtagcaatggctggacttgccgcagagggtctgcaatatgacaaagtggttggccaatctgctgaccttttcactcttcagagatttataaatagaagcaaaccacagatcagcaaagaccagcaacagaatcttactagatgggcttttcattatggagtgatacatgactaa

SEQ ID NO: 114 - protein, 286 aa, Populus balsamifera subsp. trichocarpa
  misc_feature: Ceres Annot ID no. 1450983
  misc_feature: Bit score of 611.2 for HMM based on sequences of Figure 2
  misc_feature: Functional Homolog Of Ceres Clone ID no. 33232 at SEQ ID NO. 106
MVSLSNTTASTYTAFQCCNHHHKLLQIRASSAAPGVDLKTLESALAKKDSNAVKEALDQLREVGWAKRWSSQPYVSRRTTSLRELTSLGIKNAENLAIPSVRNDAAFLFTVVGTTGFLGVLAGQLPGDWGFFVPYLIGSISLVVLAVGSISPGLLQAAISGFSAVFPDYQERIARHEAAHFLIGYLIGLPILDYSLDIGKEHVNLIDEKLEKLIYSGQLDAKELDRLAVVAMAGLAAEGLQYDKVVGQSADLFTLQRFINRSKPQISKDQQQNLTRWAFHYGVIHD

SEQ ID NO: 115 - protein, 330 aa, Populus balsamifera subsp. trichocarpa
  misc_feature: Public GI ID no. 118487460
  misc_feature: Bit score of 499.4 for HMM based on sequences of Figure 2
  misc_feature: Functional Homolog Of Ceres Clone ID no. 33232 at SEQ ID NO. 106
MGTVVYYTGLVPPRLRLCSKKIVGSSVGVQRQQVLEQVDKELSKGDERAALSLVKDLQGKPGGLRCFGAGRQIPQRLYTLDELKLNGIETRSLLSPVDATLGAIERTLQLAGVAGGLATWNAFGFSPQQILLFSLGLLFLWTLDSVSFNGGLGSLVLDTIGHTFSQKYHNRVIQHEAGHFLIAYMVGILPRGYTLTSLEALQKDGSFNVQAGTAFVDFDFLEEVNTGKVSATTLNRFSCIALAGVATEYLLFGYAEGGLADINKLDMLIKGLGFTQKKADSQVRWSVLNTILMLRRHEGAREKLAEAMTMGKSVGSCIGIIEDNIDAADI

SEQ ID NO: 116 - DNA, 1152 bp, Populus balsamifera subsp. trichocarpa
  misc_feature: Ceres Annot ID no. 1469397
  misc_feature: Encodes the peptide sequence at SEQ ID NO. 117
atgggcacagtagtgtattacacaggtttagtttctccaagattgagattatgctctaaaaaaattgtgggttcttcagttggtgtacaaagacagcaagttttggagcaagtggacaaggagctaagtaagggagatgaaagagcagcactctctcttgtcaaggatttgcaagggaagcccggtgggcttagatgttttggtgctggaaggcagataccacaaaggctttacacattggatgaattgaagctaaatggaatagagacaagatcacttttatctcctgtggatgcaactcttggtgctatagaaagaactctgcagcttgctggtgttgctggagggcttgctacatggaatgcatttgggtttagtccacaacagatcctccttttctccttggggttgttgtttttgtggactttggactctgtgtcttttaatggaggtcttggcagcttggttcttgatacaattgggcacaccttcagtcagaagtaccacaaccgggttattcaacatgaagctggccatttcctgattgcctacatggtgggcatccttccaagaggttatacacttacaagcctggaagctttacagaaggatggatctttcaatgttcaagcagggactgcttttgtggattttgattttcttgaagaagtaggtttcagaaggaacattattttgaaattacttattcttggtattgctgctgattcttccactttccatggcatacaggttaatacaggaaaagtatcagctacgactctgaacagattctcctgtatagcacttgcgggtgtagcgaccgagtaccttttattcggatacgccgagggtggacttgctgatataaataaggtttcgtcatgcagaaatctcaggaatatgcaaatattgactttaactgtggaaccttatcatttgcttattgcacagttggatatgttaatcaagggcttaggcttcactcaaaagaaagcagattcccaagtcagatggtctgtcctgaacactatcctaatgttgcgtcgtcatgaaggagccagagaaaaacttgcagaggccatgacaatgggaaaatcagtaggatcttgcatcggaattatagaagataatatagatgctgcagatatctag

SEQ ID NO: 117 - protein, 383 aa, Populus balsamifera subsp. trichocarpa
  misc_feature: Ceres Annot ID no. 1469397
  misc_feature: Bit score of 417.5 for HMM based on sequences of Figure 2
  misc_feature: Functional Homolog Of Ceres Clone ID no. 33232 at SEQ ID NO. 106
MGTVVYYTGLVSPRLRLCSKKIVGSSVGVQRQQVLEQVDKELSKGDERAALSLVKDLQGKPGGLRCFGAGRQIPQRLYTLDELKLNGIETRSLLSPVDATLGAIERTLQLAGVAGGLATWNAFGFSPQQILLFSLGLLFLWTLDSVSFNGGLGSLVLDTIGHTFSQKYHNRVIQHEAGHFLIAYMVGILPRGYTLTSLEALQKDGSFNVQAGTAFVDFDFLEEVGFRRNIILKLLILGIAADSSTFHGIQVNTGKVSATTLNRFSCIALAGVATEYLLFGYAEGGLADINKVSSCRNLRNMQILTLTVEPYHLLIAQLDMLIKGLGFTQKKADSQVRWSVLNTILMLRRHEGAREKLAEAMTMGKSVGSCIGIIEDNIDAADI

SEQ ID NO: 118 - DNA, 1193 bp, Arabidopsis thaliana
  misc_feature: Ceres Annot ID no. 859452
  misc_feature: Encodes the peptide sequence at SEQ ID NO. 119
tttatctgattctgggtctgttgaaaatcaaaattttcttgagaactttttttgaagagttatgattgcattagctgcttcttcgttggggaatacaccgattgcttcgtttaaccgtcattttagattccggttacatccacgaaaccctctgatacaagcagcggtttcaccttcgtcttcttcttcttctcctactgcttcatctggctttgatttgagttctctcgaatccgccattaacaagaaagatagtaatggtgttaaggaagctctcgataaattgagtgaagaaggttgggctaagaaatggagctcccagccgtatctttcgcgccgtacgacatcactgcgggagctgacaactctcggtatcaagaatgcagagactctggccatccctagtgtcaggaacgatgcggcttttcttttcacagtagtcggatcaactgggttcatagctgtacttgccggccaacttcccggggactggggattctttgtgccttacttagttgggagcatttcgttggtagttttagccgtgggaagcgtttcaccagggcttcttcaagctgcgatttccgggttttcgacgttcttccctgattatcaagaacgaattgctgcacatgaagcagcccacttcttagtggcttacttaatcgggcttccaatcctcgggtactcgttagacatcggtaaagaacatgtcaatctcattgacgagagactagctaaactaatatacagcggcaagcttgactcaaaggagctcgataggttggctgctgttgcaatggctggacttgccgccgagggtctgaagtatgacaaagtaattggccaatctgcagatctcttctctcttcagagattcataaacagaagccaacccaaaatcagcaacgagcagcagcaaaatctaacaagatgggctgttctttactctgcttctcttctcaaaaacaacaagaccatccatgaagctctaatggctgcaatgtccaaaaatgcatctgttcttgaatgcattcaaaccattgagacagcttcctagatgaacaatctctgttatctctttaatcgatacaactacgtcccataacaacactcaattgtttcacatgaacttccatatcttttatatatatatataaagacacaaaagttacagactttcattatcatct

SEQ ID NO: 119 - protein, 332 aa, Arabidopsis thaliana
  misc_feature: Ceres Annot ID no. 859452
  misc_feature: Bit score of 744.8 for HMM based on sequences of Figure 2
  misc_feature: Functional Homolog Of Ceres Clone ID no. 33232 at SEQ ID NO. 106
MIALAASSLGNTPIASFNRHFRFRLHPRNPLIQAAVSPSSSSSSPTASSGFDLSSLESAINKKDSNGVKEALDKLSEEGWAKKWSSQPYLSRRTTSLRELTTLGIKNAETLAIPSVRNDAAFLFTVVGSTGFIAVLAGQLPGDWGFFVPYLVGSISLVVLAVGSVSPGLLQAAISGFSTFFPDYQERIAAHEAAHFLVAYLIGLPILGYSLDIGKEHVNLIDERLAKLIYSGKLDSKELDRLAAVAMAGLAAEGLKYDKVIGQSADLFSLQRFINRSQPKISNEQQQNLTRWAVLYSASLLKNNKTIHEALMAAMSKNASVLECIQTIETAS

SEQ ID NO: 120 - protein, 332 aa, Arabidopsis thaliana
  misc_feature: Public GI ID no. 21592852
  misc_feature: Bit score of 736.2 for HMM based on sequences of Figure 2
  misc_feature: Functional Homolog Of Ceres Clone ID no. 33232 at SEQ ID NO. 106
  misc_feature (294)..(294): Xaa is any aa, unknown, or other
MIALAASSLGNTPIASFNRHFRFRLHPRNPLIQAAVSPSSSSSSPTASSGFDLSSLESAINKKDSNGVKEALDKLSEEGWAKKWSSQPYLSRRTTSLRELTTLGIKNAETLAIPSVRNDAAFLFTVVGSTGFIAVLAGQLPGDWGFFVPYLVGSISLVVLAMGSVSPGLLQAAISGFSTFFPDYQERIAAHEAAHFLVAYLIGLPILGYSLDIGKEHVNLIDERLAKLIYSGKLDSKELDRLAAVAMAGLAAEGLKYDKVIGQSADLFSLQRFINRSQPKISNEQQQNLTRWAXLYSASLLKNNKTIHEALMAAMSKNASVLECIQTIETAS

SEQ ID NO: 121 - DNA, 1212 bp, Arabidopsis thaliana
  misc_feature: Ceres Annot ID no. 884039
  misc_feature: Encodes the peptide sequence at SEQ ID NO. 122
attactattgcaaatccattactgggtcagatttagtttcacaaaatcctttattgctgaatggttatgttgttacatagtgtgggactaattccatgttcaaaccaacaaaagtcttttctcttccatagttattaccgttacagatgcatagtttgttcatctgaaacaggtttgtccataagaagacaagctttggagcaagttgattctaagttgtctagtggagacgaaagagctgcattgtctcttgtcaaagatctccaaggaaaacctgatggccttcgatgttttggcgctgcaaggcaggtgcctcagagactctacacgttggaggaactgaaactgaatggtattaacgcagcttcacttctctcgccaacagatacaacgcttggctccatcgaaagaaaccttcagatcgcagctgtctcagggggaatagttgcttggaaagcctttgacttgagttctcaacagcttttctttcttactcttgggtttatgttcctgtggactttggatttggtctcttttaatggcggaattgggagtttggttcttgatacaactggtcatacgtttagccaacgataccataacagagttgttcagcacgaagcgggtcatttcttggtggcctacttagtcgggattctaccacgcggatacacgctctctagccttgaagctttacagaaagaaggatctctcaacattcaagctggctcagcttttgtagactatgaattccttgaagaagttaattctggaaaagtctccgctacgatgctgaacagattctcatgcattgctctggctggtgtagcaacagaatatctcctgtatggttatgctgaaggaggccttgacgatatcagcaagttagatggtttggtgaagagtttggggttcacacagaagaaagcggactcgcaggtgaggtggtcagtccttaacaccatactgctactacgtcgccatgagatagctcgatcgaagctcgcgcaggctatgtccaaaggagaatctgtcggatcttgtatccaaatcatcgaagattctatcgatccttctgatatctagaaatacatgctctcatctattttctgtaaatccagcatatgaagaagcatttatataatacactaaaaagagctatctcagaaccaaatctaccttccccaagaaattcagaacatgagctatatg

SEQ ID NO: 122 - protein, 341 aa, Arabidopsis thaliana
  misc_feature: Ceres Annot ID no. 884039
  misc_feature: Bit score of 498.8 for HMM based on sequences of Figure 2
  misc_feature: Functional Homolog Of Ceres Clone ID no. 33232 at SEQ ID NO. 106
MVMLLHSVGLIPCSNQQKSFLFHSYYRYRCIVCSSETGLSIRRQALEQVDSKLSSGDERAALSLVKDLQGKPDGLRCFGAARQVPQRLYTLEELKLNGINAASLLSPTDTTLGSIERNLQIAAVSGGIVAWKAFDLSSQQLFFLTLGFMFLWTLDLVSFNGGIGSLVLDTTGHTFSQRYHNRVVQHEAGHFLVAYLVGILPRGYTLSSLEALQKEGSLNIQAGSAFVDYEFLEEVNSGKVSATMLNRFSCIALAGVATEYLLYGYAEGGLDDISKLDGLVKSLGFTQKKADSQVRWSVLNTILLLRRHEIARSKLAQAMSKGESVGSCIQIIEDSIDPSDI

SEQ ID NO: 123 - DNA, 1214 bp, Arabidopsis thaliana
  misc_feature: Ceres Clone ID no. 38304
  misc_feature: Encodes the peptide sequence at SEQ ID NO. 124
attactattgcaaatccattactgggtcagatttagtttcacaaaatcctttattgctgaatggttatgttgttacatagtgtgggactaattccatgttcaaaccaacaaaagtcttttctcttccatagttattaccgttacagatgcatagtttgttcatctgaaacaggtttgtccataagaagacaagctttggagcaagttgattctaagttgtctagtggagacgaaagagctgcattgtctcttgtcaaagatctccaaggaaaacctgatggccttcgatgttttggcgctgcaaggcaggtgcctcagagactctacacgttggaggaactgaaactgaatggtattaacgcagcttcacttctctcgccaacagatacaacgcttggctccatcgaaagaaaccttcagatcgcagctgtctcagggggaatagttgcttggaaagcctttgacttgagttctcaacagcttttctttcttactcttgggtttatgttcctgtggactttggatttggtctcttttaatggcggaattgggagtttggttcttgatacaactggtcatacgtttagccaacgataccataacagagttgttcagcacgaagcgggtcatttcttggtggcctacttagtcgagattctaccacgcggatacacgctctctagccttgaagctttacagaaagaaggatctctcaacattcaagctggctcagcttttgtagactatgaattccttgaagaagttaattctggaaaagtctccgctacgatgctgaacagattctcatgcattgctctggctggtgtagcaacagaatatctcctgtatggttatgctgaaggaggccttgacgatatcagcaagttagatggtttggtgaagagtttggggttcacacagaagaaagcggactcgcaggtgaggtggtcagtccttaacaccatactgctactacgtcgccatgagatagctcgatccaagctcgcgcaggctatgtccaaaggagaatctgtcggatcttgtatccaaatcatcgaagattctatcgatccttctgatatctagaaatacatactctcgtctattttctgtaaatccagcatatgaagaagcatttatataatacactaaaaagagctatctcagaaccaaatctaccttccccaagaaattcagaacatgagctatatgac

SEQ ID NO: 124 - protein, 341 aa, Arabidopsis thaliana
  misc_feature: Ceres Clone ID no. 38304
  misc_feature: Bit score of 490.8 for HMM based on sequences of Figure 2
  misc_feature: Functional Homolog Of Ceres Clone ID no. 33232 at SEQ ID NO. 106
MVMLLHSVGLIPCSNQQKSFLFHSYYRYRCIVCSSETGLSIRRQALEQVDSKLSSGDERAALSLVKDLQGKPDGLRCFGAARQVPQRLYTLEELKLNGINAASLLSPTDTTLGSIERNLQIAAVSGGIVAWKAFDLSSQQLFFLTLGFMFLWTLDLVSFNGGIGSLVLDTTGHTFSQRYHNRVVQHEAGHFLVAYLVEILPRGYTLSSLEALQKEGSLNIQAGSAFVDYEFLEEVNSGKVSATMLNRFSCIALAGVATEYLLYGYAEGGLDDISKLDGLVKSLGFTQKKADSQVRWSVLNTILLLRRHEIARSKLAQAMSKGESVGSCIQIIEDSIDPSDI

SEQ ID NO: 125 - DNA, 1231 bp, Glycine max
  misc_feature: Ceres Clone ID no. 467904
  misc_feature: Encodes the peptide sequence at SEQ ID NO. 126
aataatttcatttcatgaacccaaaatagtttgaattaaatggtcggtttggctttgatgcagcatgtgggtgtggccctgacatcatgccctggacaactgaaaccggtaacatgtgaatttagggtcagaatccgatgctcctccaatgttggtgtttctaggcaacaagttctggagaaattggacaaggagctagcaaagggagatgatagagctgcgctcgcacttgtcaaggatttgcagggtaagcctgatggccttcggtgttttggtgcagccagacaggtgcctcaaaggctttacaccttggatgaattgaggcttaatgggattgaaactttgtctcttctttcgcccgtggacacaactcttggttcaattgagagaaacctccagattgctgctattgtaggaggccttgctgcatggaatgcctttgctatttccccacagcaaatcttctatatttcacttgggttgctctttctatggacattggacgcggtctcttttggtggaggtattggtggcttggttgttgatacaattggtcacagcttcagtcaaaaataccacaatagggttattcaacatgaagctggtcactttttaattgcctatctggtaggaatacttcctagaggatatactatttctagtttggatgctctgcagaaggtgggatctctgaatattcaagcgggcacagcctttgtagattttgagtttcaagaagaagttaattctggaaaagtatcagctacaacattgaacaaattttcatgtatagcattggctggggtgtctactgaatatcttatatatggattttctgaaggaggtctggatgacataagaaagttggatttattgctcaagggcctaggcttcacacagaagaagacagattctcaggttagatggtctttgctaaacacggtcttgctcttgcggaggcatgaagcagctcgagggaaggttgccgaggccttatcaatgggaaaatctgtaggatcctgcattgacattatagagaattctatcgatgtttcagatctctaactgaagctttgacccccttgattattcccttctgttactctaaactctgctctcagatatgttgattaatatttccataaattttcatatggtattattaccttgctcataaattttcatatgattataccgtattgttgtacagtggaaagaagtaattcaatat

SEQ ID NO: 126 - protein, 335 aa, Glycine max
  misc_feature: Ceres Clone ID no. 467904
  misc_feature: Bit score of 517.6 for HMM based on sequences of Figure 2
  misc_feature: Functional Homolog Of Ceres Clone ID no. 33232 at SEQ ID NO. 106
MQHVGVALTSCPGQLKPVTCEFRVRIRCSSNVGVSRQQVLEKLDKELAKGDDRAALALVKDLQGKPDGLRCFGAARQVPQRLYTLDELRLNGIETLSLLSPVDTTLGSIERNLQIAAIVGGLAAWNAFAISPQQIFYISLGLLFLWTLDAVSFGGGIGGLVVDTIGHSFSQKYHNRVIQHEAGHFLIAYLVGILPRGYTISSLDALQKVGSLNIQAGTAFVDFEFQEEVNSGKVSATTLNKFSCIALAGVSTEYLIYGFSEGGLDDIRKLDLLLKGLGFTQKKTDSQVRWSLLNTVLLLRRHEAARGKVAEALSMGKSVGSCIDIIENSIDVSDL

SEQ ID NO: 127 - protein, 340 aa, Medicago truncatula
  misc_feature: Public GI ID no. 124360157
  misc_feature: in Figure 2
  misc_feature: Bit score of 618.3 for HMM based on sequences of Figure 2
  misc_feature: Functional Homolog Of Ceres Clone ID no. 33232 at SEQ ID NO. 106
MIGLSLMHGVCVVGVGLPSSLGQPKLARVRIQCSTKVSSSRQQLLESVDKELTKGDDRAALALVKDLQGKPNGLQCFGAARQVPQRLYTLDELKLNGIEAMSLLSPVDTTLGSIERNLLIAAIVGGFAAWNVFGISQQQIFYISLGLLFLWTLDLVSFGGGLGSLVVDTIGHKFSQKYHNRVIQHEAGHFLIAYLVGILPKGYTLSSLDGMMKEGSLNIQAGTAFVDFEFLEEVNSGKVSATTLNKFSCIALAGVCTEYLIYGFSEGGLDDIRKLDSLLNGLGFTQKKADSQVRWSVLNTVLLLRRHEAARSKLAEAMSMGSSVGSCIDIIENSINVSDL

SEQ ID NO: 128 - DNA, 993 bp, Solanum lycopersicum
  misc_feature: Ceres Annot ID no. 8454475
  misc_feature: Encodes the peptide sequence at SEQ ID NO. 129
atggggagtattgctgcatattgtggtggattgctatgttgttcggagttacgatcgagcaattcaaggatagtttcgggcttatcggtgttggaacaggtggataaggagttgacgaagggagatgaaagggctgctttgtctcttgtcaaggatttgcagggaaaacctggtggccttcggtgttttggcgctgctagacaggtaccacagaggctgtattccttagatgaattgaagttgaatggaatagaagccatatctcttctgtcaccagttgatgctacccttggagcaattgaaagaaatctgcaaattgctgctatattaagtggttctgcagcatggaatataaaggagaacaatcttaaccctgtgataacagtttacactcttgtttatgtatatttgactgttagtctacttagtgagtcaacagaggtgaaagtttctttcaatggaggagttggtactttggtccttgacacaattggccatacattcagtcagaagtaccataacagggttattcaacatgaagctgggcatttcttgattgcctacttgctgggtattcttcccaaggggtatacactcaccagtttggatgctttgaagaaggaaggatcgttgaacatccaagcaggaacagcctttgtggacttagaatttattgaggaatttgaccctgattcattgccgtgcaggttttcatgtattgcgctagcaggtgtagcaactgagtatcttctgtttgggtatgctgagggaggtctgtctgacattaatcagttggatgcattactgaaaagcttgggatttacacagaagaaagcagattctcaggtgagatgggctgtattgaacacaatcctcattttgcgacgccacgagaaggcacgatcgaagcttgcagaggcaatgactcaagggaaatctgtgggcgtctgcattgacatcattgagaaatccatcagcgatgatgatttgtag

SEQ ID NO: 129 - protein, 330 aa, Solanum lycopersicum
  misc_feature: Ceres Annot ID no. 8454475
  misc_feature: Bit score of 467.9 for HMM based on sequences of Figure 2
  misc_feature: Functional Homolog Of Ceres Clone ID no. 33232 at SEQ ID NO. 106
MGSIAAYCGGLLCCSELRSSNSRIVSGLSVLEQVDKELTKGDERAALSLVKDLQGKPGGLRCFGAARQVPQRLYSLDELKLNGIEAISLLSPVDATLGAIERNLQIAAILSGSAAWNIKENNLNPVITVYTLVYVYLTVSLLSESTEVKVSFNGGVGTLVLDTIGHTFSQKYHNRVIQHEAGHFLIAYLLGILPKGYTLTSLDALKKEGSLNIQAGTAFVDLEFIEEFDPDSLPCRFSCIALAGVATEYLLFGYAEGGLSDINQLDALLKSLGFTQKKADSQVRWAVLNTILILRRHEKARSKLAEAMTQGKSVGVCIDIIEKSISDDDL

SEQ ID NO: 130 - DNA, 948 bp, Sorghum bicolor
  misc_feature: Ceres Annot ID no. 8703127
  misc_feature: Encodes the peptide sequence at SEQ ID NO. 131
atggcgatcgtggccgtgctcgtcgcgcccaccgcgagctccgtcgggccgcgccgccggtggcgcgccgcggcagcctcgtcttcggcggcctccggggtggaccttaaaggtctgcaggccgccatcgacaagaaaagcagcgatgatgttaaggaggcgctggaccagctcagagagctcggatgggccaagcggtggagctcgcagccctacgtgtcgcgccgcacgacatctctgcgggagctcactacccttggaatcaagaatgctgagaatctagcaattccaagtgttagaaatgatgcggcatttttgtttacagttgtgggtaccactggattcttagccgtccttgcaggccagctccctggggattggggcttctttgttccctacttgattggaagcatttcattgatcgtattggctgtcggaagcgttgctccaggtcttctgcaagcagcaattggagcattttctacggtctttcctgactatcaggagagaatagctaggcatgaagctgcccacttcctagtcgcctatttgattggcctacctatccttggatattctttggacatcggaaaggagcatgttaatttgatagatgagcagttacaaaagctaatatacagtgggaaacttgatggaaaggaactagacaggttagctgtagtttcaatggcagggctggctgctgaaggtctacaatatgacaaagttgtaggtcaatcagcagatcttttcacccttcagaggttcataaacagaactaagccgcaactaagcaaagatcaacaacaaaaccttaccagatgggcagtcctatttgctgcatcacttctgaagaacaataaggcagcccatgaagcgcttatgtcagcgatgtcccaaaaggcaagcgtgttggggtgcattgaagcaatagagaatgcatcctga

SEQ ID NO: 131 - protein, 315 aa, Sorghum bicolor
  misc_feature: Ceres Annot ID no. 8703127
  misc_feature: in Figure 2
  misc_feature: Bit score of 759.0 for HMM based on sequences of Figure 2
  misc_feature: Functional Homolog Of Ceres Clone ID no. 33232 at SEQ ID NO. 106
MAIVAVLVAPTASSVGPRRRWRAAAASSSAASGVDLKGLQAAIDKKSSDDVKEALDQLRELGWAKRWSSQPYVSRRTTSLRELTTLGIKNAENLAIPSVRNDAAFLFTVVGTTGFLAVLAGQLPGDWGFFVPYLIGSISLIVLAVGSVAPGLLQAAIGAFSTVFPDYQERIARHEAAHFLVAYLIGLPILGYSLDIGKEHVNLIDEQLQKLIYSGKLDGKELDRLAVVSMAGLAAEGLQYDKVVGQSADLFTLQRFINRTKPQLSKDQQQNLTRWAVLFAASLLKNNKAAHEALMSAMSQKASVLGCIEAIENAS

SEQ ID NO: 132 - DNA, 1005 bp, Sorghum bicolor
  misc_feature: Ceres Annot ID no. 8666968
  misc_feature: Encodes the peptide sequence at SEQ ID NO. 133
atgagcacgaacctgggaggagccccttgttgctgcttccgcttgtcccagttgcagcccgccgccgttagactccggttgccgcctgctcgcgccacagacacttcggcttcccagtcgccggcgcgcctgagggcggtgctggagcaggtggaccaggcgctaagcaaggggaacgacgaggctgcgctctcccttgtgcgcagttcgcagggggttgacggcggacttcgggcttttggcgccgccaggcaggtacctcaacgactttatacattggatgagcttaaactgaatgggattgatacttctgctttcctatcgcccgtggatctgacactaggatcaattgagagaaatatccaaattgctgcaattcttggagggctttctgtatctgctgcattagagctttctcaactccaaatcctgtttctcatactaggtctactatctttgtggtccgtggactttgtatattttggtggtggggtgagaaacttggttcttgatacaattggtcactatctcagccagaagtatcacaacagagttgttcagcatgaagctggtcacttcttgatagcatacttgcttggagtgcttccaaaaggatatacaattacaagcttggatacacttatcaatcaaggatcgcttaacgtgcaagctggaacagcttttgtggactatgagttccttggagagatggtgaacaagttctcgtgtatagcactagctggagtcgcaacagagtatcttctgtacggacttgcagaaggaggattagctgacatcaataagcttgatggattgctcaagagtttgggtttcacccaaaagaaagctgattcacaggtgaggtgggctgtgctgaacactgtcctcatactgcgtcgccatgaaaaagctagatcgcagcttgcagaggcaatgtctacaggcaagtcagtgggctcttgcatccaagtcatagaagagtgtataagcactgacgatatttaa

SEQ ID NO: 133 - protein, 334 aa, Sorghum bicolor
  misc_feature: Ceres Annot ID no. 8666968
  misc_feature: Bit score of 386.3 for HMM based on sequences of Figure 2
  misc_feature: Functional Homolog Of Ceres Clone ID no. 33232 at SEQ ID NO. 106
MSTNLGGAPCCCFRLSQLQPAAVRLRLPPARATDTSASQSPARLRAVLEQVDQALSKGNDEAALSLVRSSQGVDGGLRAFGAARQVPQRLYTLDELKLNGIDTSAFLSPVDLTLGSIERNIQIAAILGGLSVSAALELSQLQILFLILGLLSLWSVDFVYFGGGVRNLVLDTIGHYLSQKYHNRVVQHEAGHFLIAYLLGVLPKGYTITSLDTLINQGSLNVQAGTAFVDYEFLGEMVNKFSCIALAGVATEYLLYGLAEGGLADINKLDGLLKSLGFTQKKADSQVRWAVLNTVLILRRHEKARSQLAEAMSTGKSVGSCIQVIEECISTDDI

SEQ ID NO: 134 - DNA, 1260 bp, Zea mays
  misc_feature: Ceres Clone ID no. 238400
  misc_feature: Encodes the peptide sequence at SEQ ID NO. 135
gaactatgttatccaataccgttggcggtgggccgcagaaccgcgcgcacgggggagccvatggcgatcgtggccgttstygtcgcgcccaccgccagctacgtcgggccgcgccgccggtggcgcgccgcggcagcctcgtcttcggcggcgtccggggtggacctcaaagcgctgcaggccgccatcgataagaaaagcagcgatgatgttaggcaggcgctggaccagctgagagagagcggatgggccaagcggtggggctcgcagccctatgtgtcgcgccggacgacatctctacgggagctcactacccttggaatcaagaatgctgagaatttagcaattccaagtgttagaaatgatgcggcattcttgtttacagttgtgggtaccactggattcttagccgtccttgcaggccagctccctggggattggggcttctttgtcccctacttgattggaagcatttcattgatcgtattggctgtcggaagcgtcgctccaggtcttctgcaagcagcaatcggagcgttctctacagtctttcctgactaccaggagaggattgctaggcatgaagctgctcatttcctagtcgcctatttgattggcctccctatccttggatattctttggacatcggaaaggagcatgttaatttgatagatgagcaattacaaaagctaatatacagtgggcagcttgatggaaaggaactagacaggttagctgtagtttcaatggcaggactggctgctgaaggtctagaatatgacaaagttgtaggtcaatcagcagaccttttcacccttcagaggttcatgaacagaactaagccgcaactaagcaaagatcagcaacaaaaccttaccagatgggcagtcctgtttgctgcatcacttctgaagaacaacaaagcagcccatgaggcgcttatgtcagcgatgtcccaaaaggcaagcgtgttggggtgcattgaagcaattgagaatgcgtcctgatcaaaatgtaacctgagtagtgtactagcattgctggacccgatattgtttcaccgcttctgactactactgttgttggttcgttgagcctgaggaatcaggtggaggagaggatcgaggcgtaggaaggagaaaccctaatcatcaccgtcgattcctgtacttcttctgtagacatcagaaactcaggccacagggaggaaattcacacaatgacaaaaacaatagcctaatctgctgccatttactatc

SEQ ID NO: 135 - protein, 315 aa, Zea mays
  misc_feature: Ceres Clone ID no. 238400
  misc_feature: in Figure 2
  misc_feature: Bit score of 758.6 for HMM based on sequences of Figure 2
  misc_feature: Functional Homolog Of Ceres Clone ID no. 33232 at SEQ ID NO. 106
  misc_feature (7)..(7): Xaa is any aa, unknown, or other
MAIVAVXVAPTASYVGPRRRWRAAAASSSAASGVDLKALQAAIDKKSSDDVRQALDQLRESGWAKRWGSQPYVSRRTTSLRELTTLGIKNAENLAIPSVRNDAAFLFTVVGTTGFLAVLAGQLPGDWGFFVPYLIGSISLIVLAVGSVAPGLLQAAIGAFSTVFPDYQERIARHEAAHFLVAYLIGLPILGYSLDIGKEHVNLIDEQLQKLIYSGQLDGKELDRLAVVSMAGLAAEGLEYDKVVGQSADLFTLQRFMNRTKPQLSKDQQQNLTRWAVLFAASLLKNNKAAHEALMSAMSQKASVLGCIEAIENAS

SEQ ID NO: 136 - DNA, 1316 bp, Zea mays
  misc_feature: Ceres Clone ID no. 338909
  misc_feature: Encodes the peptide sequence at SEQ ID NO. 137
aaaaaaatgagcacgaacctgggaggagcctcttgcttcggcttcggcttgactcagctgcagcccgccgccgttaggctccggttgccgcctgctcgcgccgcggacacttcgtcctcccagtcgccggcgcgcctgacggcggtgctggagcaggtggaccagttgctaagccaggggaacgacatggccgcgctctccctcgtgcgcagtacgcaggggggtgacggcgggctccgggcctttggcgccgccaggcaggtacctcaacgactttataaattggatgagcttaaactgaatgggattgatacttctgctttcctatcacccgtagatctgacactaggatcaattgagagaaatctccaaatcgctgcagttctgggagggctttctgtatcagctgcattggaactttctcaactccaaatcctgtttctcatactaggtctactatctttgtggtccgtggactttgtatattttggtggtggggtgagaaacttggttcttgatacaattggtcactatcttagccagaagtatcacaacagagttatccagcatgaagctggtcacttcttgatagcttacttgcttggagtgcttccaaaaggatacacaatcacaagcttagatacacttatgaatcaaggatcgcttaatgtgcaagctggagcagcttttgtggactatgagttccttgaagagatcaatacaggcaagctatctgccacgatggttaacaagttctcgtgtatagcactagccggagttgcagcagagtatcttctgtatggacgtgcaggaggaggattagccgacatcaataagcttgatggattgctcaagggtttgggtttcacccaaaagaaagctgattcacaggtgagatgggctgtgctgaatactgttctcatactgcgtcgccatgaaaaagctagatcgcagcttgcagaggcaatgtctacagggaagtcggtgggctcttgcatccaagtcatagaagagtgtataagcactgacgatatttaacgtggatatgttgctgaccctacgttgtctcaatggcatgttatcaacaacaaatcaaggcttgtcaatccaaaagaggatttgagtattaaatccactcttaaggctagtttgagaaccttatttttttaagagattttcttttttttttaagataaattagtttattttctcttgagaaaatagaaatctcttggaaaattggagttgctaaactagcccttagtcaaaaatgactagtagagaatttaatcttcaattgccttctggatttacgc

SEQ ID NO: 137 - protein, 343 aa, Zea mays
  misc_feature: Ceres Clone ID no. 338909
  misc_feature: Bit score of 412.2 for HMM based on sequences of Figure 2
  misc_feature: Functional Homolog Of Ceres Clone ID no. 33232 at SEQ ID NO. 106
MSTNLGGASCFGFGLTQLQPAAVRLRLPPARAADTSSSQSPARLTAVLEQVDQLLSQGNDMAALSLVRSTQGGDGGLRAFGAARQVPQRLYKLDELKLNGIDTSAFLSPVDLTLGSIERNLQIAAVLGGLSVSAALELSQLQILFLILGLLSLWSVDFVYFGGGVRNLVLDTIGHYLSQKYHNRVIQHEAGHFLIAYLLGVLPKGYTITSLDTLMNQGSLNVQAGAAFVDYEFLEEINTGKLSATMVNKFSCIALAGVAAEYLLYGRAGGGLADINKLDGLLKGLGFTQKKADSQVRWAVLNTVLILRRHEKARSQLAEAMSTGKSVGSCIQVIEECISTDDI

SEQ ID NO: 138 - DNA, 744 bp, Musa acuminata
  misc_feature: Ceres Clone ID no. 1728626
  misc_feature: Encodes the peptide sequence at SEQ ID NO. 139
agggcgagatggtcatccccctggccgctttccttcttcctccgaaccctcgttcgtctcctcctcctcccgatccttacctgaggagctcgcctgtgctcaagaaatggcggatcggggcttcttccgccgctcctggggttgatctcaagccgctagagacggccatcgccaagaaggatagcgttgctgttaaggagattcttgatcagctgaatcaaataggttgggcaaagaaatggagctctcagccatatgtatcacgtcgtatgacatccttacgggagcttaccactctgggaataaaaaacgcagagaaccttgcaataccaagtgttaggaatgatgcagcttttctattcacagtagtgggaaccacgagtttgcttgctgtcattgccggtcagcttcctggggactggggtttctttgtgccttacttaattggtagcatttcattaatagtactggctgttgggagcatttctcctggtcttctgcaggctgcgattaatggattttcttcattttttcctgattaccaagagaggattgctagacatgaagctgctcatttcttggttgcctacttgattggcctgcctatcttgggatattcgctggacatcggaaaggagcacgtcaatttggttgatgagcggcttcagaaactactatacagtggacaacttgatgagaaggaattggacaggttggctgctgtgtcgatggctggacttgcag

SEQ ID NO: 139 - protein, 245 aa, Musa acuminata
  misc_feature: Ceres Clone ID no. 1728626
  misc_feature: Bit score of 366.8 for HMM based on sequences of Figure 2
  misc_feature: Functional Homolog Of Ceres Clone ID no. 33232 at SEQ ID NO. 106
MVIPLAAFLLPPNPRSSPPPPDPYLRSSPVLKKWRIGASSAAPGVDLKPLETAIAKKDSVAVKEILDQLNQIGWAKKWSSQPYVSRRMTSLRELTTLGIKNAENLAIPSVRNDAAFLFTVVGTTSLLAVIAGQLPGDWGFFVPYLIGSISLIVLAVGSISPGLLQAAINGFSSFFPDYQERIARHEAAHFLVAYLIGLPILGYSLDIGKEHVNLVDERLQKLLYSGQLDEKELDRLAAVSMAGLA

SEQ ID NO: 140 - protein, 323 aa, Vitis vinifera
  misc_feature: Public GI ID no. 157345039
  misc_feature: in Figure 2
  misc_feature: Bit score of 762.8 for HMM based on sequences of Figure 2
  misc_feature: Functional Homolog Of Ceres Clone ID no. 33232 at SEQ ID NO. 106
MSLSVTSVASLSELRCIGFESHHTCFRNTRKWRIRSSSAAPGVDLNTLQSAIDMKDSNAVKEALDQLREVGWAKKWSSQPYVSRRMTSLRELTTLGMKNAENLAIPSVRNDAAFLFTVVGTTGFLGVLAGQLPGDWGFFVPYLIGSISLIVLAIGSISPGLLQVAIGGFSSFFPDYQERIARHEAAHFLVAYLLGLPILGYSLDIGKEHVNLIDERLEKLIYSGQLDTKELDRLAVVAMAGLAAEGLQYDKVVGQSADLFTLQRFINRSKPQLSKDQQQNLTRWAVLFAGSLIKNNKAIHEALMTAMSKKGTVLECIEAIEKA

SEQ ID NO: 141 - protein, 320 aa, Vitis vinifera
  misc_feature: Public GI ID no. 147815273
  misc_feature: Bit score of 500.7 for HMM based on sequences of Figure 2
  misc_feature: Functional Homolog Of Ceres Clone ID no. 33232 at SEQ ID NO. 106
MGRLRVPTLRIVSSLGTNVSRWQVLEQVDKELAKGDDRTALSLVKDLQGKPDGLRCFGAARQVPQRLYTLDELKLNGIEASSLLSPVDATLGSIERNLQLAAVLGGLSAWNVFGFSPQQLLFLSLGLLFLWTLDLVSFNGGVGSLVLDTIGHTFSQKYHNRVIQHEAGHFLIAYLLGILPKGYTLTSLEALQKEGSLNIQAGTAFVDFEFLEEVNSGKVSATMLNRFSCIALAGVVTEYLLYGYAEGGLADINKLDLLLKGLGFTQKKADSQVRWSVLNTVLILRRNKQARGKLAEAMSMGKSVGACIGVIEENIDNTDI

SEQ ID NO: 142 - protein, 332 aa, Vitis vinifera
  misc_feature: Public GI ID no. 157359875
  misc_feature: Bit score of 517.9 for HMM based on sequences of Figure 2
  misc_feature: Functional Homolog Of Ceres Clone ID no. 33232 at SEQ ID NO. 106
MGTVVYRAAVCSHPRLRVPTLRIVSSLGTNVSRWQVLEQVDKELAKGDDRTALSLVKDLQGKPDGLRCFGAARQVPQRLYTLDELKLNGIEASSLLSPVDATLGSIERNLQLAAVLGGLSAWNVFGFSPQQLLFLSLGLLFLWTLDLVSFNGGVGSLVLDTIGHTFSQKYHNRVIQHEAGHFLIAYLLGILPKGYTLTSLEALQKEGSLNIQAGTAFVDFEFLEEVNSGKVSATMLNRFSCIALAGVVTEYLLYGYAEGGLADINKLDLLLKGLGFTQKKADSQVRWSVLNTVLILRRNKQARGKLAEAMSMGKSVGACIGVIEENIDNTDI

SEQ ID NO: 143 - protein, 343 aa, Oryza sativa subsp. indica
  misc_feature: Public GI ID no. 125526023
  misc_feature: Bit score of 383.0 for HMM based on sequences of Figure 2
  misc_feature: Functional Homolog Of Ceres Clone ID no. 33232 at SEQ ID NO. 106
MPQFFGLHVLKMMRLGRAPCCYCFTEPHPAAVRLRVLPPARAANTSSEPAARLRAVLEQVDEELRKGNDEAALSLVRGSQGADGGLRFFGAARQVPQRLYTLDELKLNGIDTSAFLSPVDLTLGSIERNLQIAAVLGGLSVSAAFELSQLQVLFLFLGLLSLWSVDLVYFGGGVRNLILDTIGHNLSQKYRNRVIQHEAGHFLIAYLLGVLPKGYSITSLDTFIKKGSLNVQAGTAFVDFEFLQEMLNKFSCIALAGVATEYLLYGYAEGGLADIGQLDGLLKGLGFTQKKADSQVRWAVLNTVLALRRHKKARSQLAEAMSSGKSVGSCIGVIEENINSEDI

SEQ ID NO: 144 - protein, 325 aa, Oryza sativa subsp. japonica
  misc_feature: Public GI ID no. 58531976
  misc_feature: in Figure 2
  misc_feature: Bit score of 765.9 for HMM based on sequences of Figure 2
  misc_feature: Functional Homolog Of Ceres Clone ID no. 33232 at SEQ ID NO. 106
MAIVAALVAPTANPHNPLRLIAAAPHRQWRRVAAAASSSAAPGVDLKALQAAIDKKDSEEVKQAMDQLKELGWAKRWSSQPYVSRRTTSLRELTTLGIKNAENLAIPSVRNDAAFLFTVVGSTGFLGVLAGQLPGDWGFFVPYLIGSISLIVLAIGSISPGLLQAAIGAFSTVFPDYQERIARHEAAHFLVAYLIGLPILGYSLDIGKEHVNLIDDQLQKLIYSGQLDQKEIDRLAVVSMAGLAAEGLEYDKVVGQSADLFTLQRFINRTKPPLTKDQQQNLTRWAVLFSASLLKNNKAAHEALMSAMSQKASVLGCIEAIENAS

SEQ ID NO: 145 - protein, 322 aa, Oryza sativa subsp. japonica
  misc_feature: Public GI ID no. 125591796
  misc_feature: Bit score of 696.7 for HMM based on sequences of Figure 2
  misc_feature: Functional Homolog Of Ceres Clone ID no. 33232 at SEQ ID NO. 106
MAIVAALVAPTANPHNPLRLIAASPHRAMAARRRRRLLLGGARDHWDLGIEQKDSEEVKQAMDQLKELGWAKRWSSQPYVSRRTTSLRKLTTLGIKNPENLAIPSVRNDAAFLFTVVGSTGFLGVLAGQLPGDWGFFVPYLIGSISLIVLAIGSISPGLLQAAIGAFSTVFPDYQERIARHEAAHFLVAYLIGLPILGYSLDIGKEHVNLIDDQLQKLIYSGQLDQKEIDRLAVVSMAGLAAEGLEYDKVVGQSADLFTLQRFINRTKPPLTKDQQQNLTRWAVLFSASLLKNNKAAHEALMSAMSQKASVLGCIEAIENAS

SEQ ID NO: 146 - protein, 346 aa, Oryza sativa subsp. japonica
  misc_feature: Public GI ID no. 115436670
  misc_feature: Bit score of 417.8 for HMM based on sequences of Figure 2
  misc_feature: Functional Homolog Of Ceres Clone ID no. 33232 at SEQ ID NO. 106
MMRLGRAPCCYCFTEPHPAGGVAAAVRLRLLPPARAANTSSEPAARLRAVLEQVDEELRKGNDEAALSLVRGSQGADGGLRFFGAARQVPQRLYTLDELKLNGIDTSAFLSPVDLTLGSIERNLQIAAVLGGLSVSAAFELSKLQVLFLFLGLLSLWSVDLVYFGGGVRNLILDTIGHNLSQKYRNRVIQHEAGHFLIAYLLGVLPKGYTITSLDTFIKKGSLNVQAGTAFVDFEFLQEVNSGKLSATMLNKFSCIALAGVATEYLLYGYAEGGLADIGQLDGLLKGLGFTQKKADSQVRWAVLNTVPALRRHKKARSQLAEAMSSGKSVGSCIGVIEENINSEDI

SEQ ID NO: 147 - protein, 348 aa, Oryza sativa subsp. japonica
  misc_feature: Public GI ID no. 125570472
  misc_feature: Bit score of 379.0 for HMM based on sequences of Figure 2
  misc_feature: Functional Homolog Of Ceres Clone ID no. 33232 at SEQ ID NO. 106
MPQFFGLHVLKMMRLGRAPCCYCFTEPHPAGGVAAAVRLRLLPPARAANTSSEPAARLRAVLEQVDEELRKGNDEAALSLVRGSQGADGGLRFFGAARQVPQRLYTLDELKLNGIDTSAFLSPVDLTLGSIERNLQIAAVLGGLSVSAAFELSKLQVLFLFLGLLSLWSVDLVYFGGGVRNLILDTIGHNLSQKYRNRVIQHEAGHFLIAYLLGVLPKGYTITSLDTFIKKGSLNVQAGTAFVDFEFLQEMLNKFSCIALAGVATEYLLYGYAEGGLADIGQLDGLLKGLGFTQKKADSQVRWAVLNTVPALRRHKKARSQLAEAMSSGKSVGSCIGVIEENINSEDI

SEQ ID NO: 148 - protein, 340 aa, Ostreococcus tauri
  misc_feature: Public GI ID no. 116056026
  misc_feature: in Figure 2
  misc_feature: Bit score of 692.0 for HMM based on sequences of Figure 2
  misc_feature: Functional Homolog Of Ceres Clone ID no. 33232 at SEQ ID NO. 106
MLSASTAVAPGRVALSKTRANARGHRVQLKSRSYVTANASKAEKYDEIDKELSKVRALPPSERAEALEIATSTVRGALNAMREDSWLWNSALKNPQRRNVFPNELKRVLKAAPEQIAKPSDANDLKLIVTVTLTCSLAAVVVGATLPGDIGAFGAYLLGGIPIVVLAVGSTAPGLLRVATDRLARVDPEYRRRIARHEAGHFLVGYACGVPVGSYNLGIDESHVNFMESKLERKIFQGAKLSSSEVLPLAVISMAGVAAEAMEFEEVMGQSADLFDLQRILNRVDPKLNDASQQEITRWAVFQAATILSENRAAFDALTEKMQEGASVVDCLQTIEAKRA

SEQ ID NO: 149 - protein, 326 aa, Solanum xanthocarpum
  misc_feature: Public GI ID no. 58198153
  misc_feature: Bit score of 575.9 for HMM based on sequences of Figure 2
  misc_feature: Functional Homolog Of Ceres Clone ID no. 33232 at SEQ ID NO. 106
MGSIAAYCGGLLCCSQLRSSNSRILSGLSVLEQVDKELMKGDERAALSLVKDLRGKPGGLRCFGAARQVPQRLYSLDELRLNGIETVSLLSPVDATLGAIERNLQIVAILSGSAAWYALDLSPQQILFVSLGVLFLWTLDLVSFNGGVGALVLDTIGHTFSQKYHNRVTQHEAGHFLIAYLLGILPKGYTLTSLDALKKQGSLNIQAGTAFVDFEFIEEVNSGKVTATMLNRFSCIALAGVATEYLLFGYAEGGLSDINQLDALLKSLGFTQKKADSQVRWAVLNTILILRRHEKARVKLAEAMTRGKSVGVCIDIIEKSISEDDL

SEQ ID NO: 150 - protein, 246 aa, Ostreococcus lucimarinus CCE9901
  misc_feature: Public GI ID no. 145355993
  misc_feature: Bit score of 383.3 for HMM based on sequences of Figure 2
  misc_feature: Functional Homolog Of Ceres Clone ID no. 33232 at SEQ ID NO. 106
MQRRNVFPNELKRLLKCAPEQIARPSDANDFNLIVTVTLSTSLLATVVGATLPGDWGAFGAYLIGGISLAVLAVGSTAPGLLRVATDRLARVNPEYRRRIARHEAGHFLVGYALGVPVGSYDLGIDQSHVNFMESKLERKIFQGAKLSESEMLPLAVVSMSGVAAEAMEFDEVMGQSADLYDLQRILNRVDPKLSDASQQELTRWAVFQAASILKTNKSAWDTLTEKMLDGASVVECLKTIESTAP

SEQ ID NO: 151 - protein, 344 aa, Arabidopsis thaliana
  misc_feature: Bit score of 725.6 for HMM based on sequences of Figure 2
  misc_feature: Functional Homolog Of Ceres Clone ID no. 33232 at SEQ ID NO. 106
MIALAASSLGNTPIASFNRHFRFRLHPRNPLIQAAVSPSSSSSSPTASSGFDLSSLESAINKKDSNGVKEALDKLSEEGWAKKWSSQPYLSRRTTSLRELTTLGIKNAETLAIPSVRNDAAFLFTVVGSTGFIAVLAGQLPGDWGFFVPYLVGSISLVVLAVGSVSPGLLQAAISGFSTFFPDYQERIAAHEAAHFLGTLEKFKSFDSKVAYLIGLPILGYSLDIGKEHVNLIDERLAKLIYSGKLDSKELDRLAAVAMAGLAAEGLKYDKVIGQSADLFSLQRFINRSQPKISNEQQQNLTRWAVLYSASLLKNNKTIHEALMAAMSKNASVLECIQTIETAS

SEQ ID NO: 152 - protein, 315 aa, Zea mays
  misc_feature: Bit score of 754.8 for HMM based on sequences of Figure 2
  misc_feature: Functional Homolog Of Ceres Clone ID no. 33232 at SEQ ID NO. 106
MAIVAVLVAPTASYVGPRRRWRATAASSSAASGVDLKTLQAAIDKKSSDDVRQALDQLRESGWAKRWGSQPYVSRRTTSLRELTTLGIKNAENLAIPSVRNDAAFLFTVVGITGFLAVLAGQLPGDWGFFVPYLIGSISLIVLAVGSVAPGLLQAAIGAFSTVFPDYQERIARHEAAHFLVAYLIGLPILGYSLDIGKEHVNLIDEQLQKLIYSGQLDGKELDRLAVVSMAGLAAEGLEYDKVVGQSADLFTLQRFINRTKPQLSKDQQQNLTRWAVLFAASLLKNNKAAHEALMSAMSQKASVLGCIEAIENAS

SEQ ID NO: 153 - protein, 315 aa, Zea mays
  misc_feature: Bit score of 759.8 for HMM based on sequences of Figure 2
  misc_feature: Functional Homolog Of Ceres Clone ID no. 33232 at SEQ ID NO. 106
MAIVAVLVAPTASYVGPRRRWRAAAASSSAASGVDLKALQAAIDKKSSDDVRQALDQLRESGWAKRWGSQPYVSRRTTSLRELTTLGIKNAENLAIPSVRNDAAFLFTVVGTTGFLAVLAGQLPGDWGFFVPYLIGSISLIVLAVGSVAPGLLQAAIGAFSTVFPDYQERIARHEAAHFLVAYLIGLPILGYSLDIGKEHVNLIDEQLQKLIYSGQLDGKELDRLAVVSMAGLAAEGLEYDKVVGQSADLFTLQRFINRTKPQLSKDQQQNLTRWAVLFAASLLKNNKAAHEALMSAMSQKASVLGCIEAIENAS

SEQ ID NO: 154 - protein, 315 aa, Zea mays
  misc_feature: Bit score of 758.8 for HMM based on sequences of Figure 2
  misc_feature: Functional Homolog Of Ceres Clone ID no. 33232 at SEQ ID NO. 106
MAIVAVLVAPTASYVGPRRRWRAAAASSSAASGVDLKALQAAIDKKSSDDVRQALDQLRESGWAKRWGSQPYVSRRTTSLRELTTLGIKNAENLAIPSVRNDAAFLFTVVGTTGFLAVLAGQLPGDWGFFVPYLIGSISLIVLAVGSVAPGLLQAAIGAFSTVFPDYQERIARHEAAHFLVAYLIGLPILGYSLDIGKEHVNLIDEQLQKLIYSGQLDGKELDRLAVVSMAGLAAEGLEYDKVVGQSADLFTLQRFMNRTKPQLSKDQQQNLTRWAVLFAASLLKNNKAAHEALMSAMSQKASVLGCIEAIENAS

SEQ ID NO: 155 - protein, 255 aa, Brassica napus
  misc_feature: Bit score of 408.4 for HMM based on sequences of Figure 2
  misc_feature: Functional Homolog Of Ceres Clone ID no. 33232 at SEQ ID NO. 106
MVALAVGSSGIASFRRHYSFRLRPRNPPTQAAVSPSSSSASASPGVDLSTLESAINKKDSSGVKEALDRLGEEGWAKKWSSQPYMSRRTTSLRELTTLGIKNAETLAIPSVRNDAAFLFTVVGTTSFIAVLAGQLPGDWGFFVPYLVGSISLVVLAVGSVSPGLLQAAISGFSTFFPDYQERIAAHEAAHFLVAYLIGLPILGYSLDIGKEHVNLIDERLAKLIYSGQLDLKELDRVACCAMAGLAAQGLKYDQM

SEQ ID NO: 156 - protein, 278 aa, Lactuca perennis
  misc_feature: Bit score of 540.7 for HMM based on sequences of Figure 2
  misc_feature: Functional Homolog Of Ceres Clone ID no. 33232 at SEQ ID NO. 106
  misc_feature (257)..(257): Xaa is any aa, unknown, or other
MSSISVSLFGSLARSTHSRNWRIRSSSAAPPNVDFTSLESAIAKKDSDGVKEALSQLSEIGWAKKWGSQPYVSRRPTSLRELTILGLKNAENLAIPSVRNDAAFLFTVVGTTGFLGVLAGQLPGDWGFFVPYLIGSISLVVLAVGSISPGLLQAAIGGFSTFFPDYQDRIARHEAAHFLIAYLLGLPILGYSLDIGKENVNLIDEKLEKLIYSGQLDAKELDRLAVVAMAGLAAEGLKYDKVIGQSADLFTLQRFIXRSKPQVKPTEQQNLTRWAVLF

SEQ ID NO: 157 - protein, 236 aa, Brassica rapa
  misc_feature: Bit score of 353.8 for HMM based on sequences of Figure 2
  misc_feature: Functional Homolog Of Ceres Clone ID no. 33232 at SEQ ID NO. 106
MVALAVSSSGIASFRRHYSFRLRPRNPPTQAAVSPSSSSASASPGVDLSTLESAINKKDSSGVKEALDRLGEEGWAKKWSSQPYMSRRTTSLRELTTLGIKNAETLAIPSVRNDAAFLFTVVGTTGFIAVLAGQLPGDWGFFVPYLVGSISLVVLAVGSVSPGLLQAAISGFSTFFPDYQERIAAHEAAHFLVAYLIGLPILGYSLDIGKEHVNLIDERLAKLIYSGQLDSKELDR

SEQ ID NO: 158 - protein, 237 aa, Brassica rapa
  misc_feature: Bit score of 356.4 for HMM based on sequences of Figure 2
  misc_feature: Functional Homolog Of Ceres Clone ID no. 33232 at SEQ ID NO. 106
MVALAVSSSGIASFRRHYSFRLRPRNPPTQAAVSPSSSSASASPGVDLSTLESAINKKDSSGVKEALDRLGEEGWAKKWSSQPYMSRRTTSLRELTTLGIKNAETLAIPSVRNDAAFLFTVVGTTSFIAVLAGQLPGDWGFFVPYLVGSISLVVLAVGSVSPGLLQAAISGFSTFFPDYQERIAAHEAAHFLVAYLIGLPILGYSLDIGKEHVNLIDERLAKLIYSGQLDSKELDRL

SEQ ID NO: 159 - protein, 242 aa, Raphanus sativus
  misc_feature: Bit score of 433.4 for HMM based on sequences of Figure 2
  misc_feature: Functional Homolog Of Ceres Clone ID no. 33232 at SEQ ID NO. 106
  misc_feature (25)..(25): Xaa is any aa, unknown, or other
MSRRTTSLRELTISDQECRESCHPXCQNDAAFLVTVVGTTSFLAVIAGQLPGDWGFFVPYLVGSISLVVLGVGSVSPGLLQAAISGFSTFFPDYQERLAAHEAAHFLVAYLIGLPILGYSLDIGKEHVNLIDERLAKLIYSGQLDSKELDRLAAVAMAGLAAEGLKYDKVIGQSADLFSLQRFINRSQPKISSEQQQNLTRWAVLYSASLLKNNKTIHEALMAAMSNNASVLECIKTIETAS

SEQ ID NO: 160 - protein, 263 aa, Lactuca perennis
  misc_feature: Bit score of 491.3 for HMM based on sequences of Figure 2
  misc_feature: Functional Homolog Of Ceres Clone ID no. 33232 at SEQ ID NO. 106
MSSISVSLFGSLARSTHSRNWRIRSSSAAPPNVDFTSLESAIAKKDSDGVKEALSQLSEIGWAKKWGSQPYVSRRPTSLRELTILGLKNAENLAIPSVRNDAAFLFTVVGTTGFLGVLAGQLPGDWGFFVPYLIGSISLVVLAVGSISPGLLQAAIGGFSTFFPDYQDRIARHEAAHFLIAYLLGLPILGYSLDIGKENVNLIDEKLEKLIYSGQLDAKELDRLAVVAMAGLAAEGLKYDKVIGQSADLFTLQRFINRSKPPG

SEQ ID NO: 161 - protein, 252 aa, Raphanus raphanistrum
  misc_feature: Bit score of 352.6 for HMM based on sequences of Figure 2
  misc_feature: Functional Homolog Of Ceres Clone ID no. 33232 at SEQ ID NO. 106
MVALAVSSSGIASSRRHYSFQLRRPRNPPTQTAVSSSSAAASPGFDLSTLESAINKKDSSGVKEALDRLSEEGWAKKWSSQPYMSRRTTSLRELTNLGIKNAENLAIPSVRNDAAFLVTVVGTTSVLAVIAGQLPGDWGFFVPYLVGSISLVVLGVGSVSPGLLQAAISGFSTFFPDYQERLAAHEAAHFLVAYLIGLPILGYSLDIGKEHVNLIDERLAKLIYSGQLDSKSLIVGCCCNGWTAAEGLKYDK

SEQ ID NO: 162 - protein, 304 aa, Ostreococcus lucimarinus
  misc_feature: Bit score of 448.9 for HMM based on sequences of Figure 2
  misc_feature: Functional Homolog Of Ceres Clone ID no. 33232 at SEQ ID NO. 106
  misc_feature (254)..(254): Xaa is any aa, unknown, or other
MFTLTSSARAPAPARRHARVIARRSRVVVARASPAASYDAIDDVLSKVRALPPSERAEALERATTDVRAALKTLKDSGAVKVWNSAGEAPMQRRNVFPNELKRLLKCAPEQIARPSDANDFNLIVTVTLSTSLLATVVGATLPGDWGAFGAYLIGGISLAVLAVGSTAPGLLRVATDRLARVNPEYRRRIARHEAGHFLVGYALGVPVGSYDLGIDQSHVNFMESKLERKIFQGAKLSESEMLPLAVVSMSGVXAEAMEFDEIMGQSADLYDLQRILNRVDPKLSDASQQELTRWGVLPAASIL

SEQ ID NO: 163 - protein, 280 aa, Solanum virginianum
  misc_feature: Bit score of 444.4 for HMM based on sequences of Figure 2
  misc_feature: Functional Homolog Of Ceres Clone ID no. 33232 at SEQ ID NO. 106
MKGDERAALSLVKDLRGKPGGLRCFGAARQVPQRLYSLDELRLNGIETVSLLSPVDATLGAIERNLQIVAILSGSAAWYALDLSPQQILFVSLGVLFLWTLDLVSFNGGVGALVLDTIGHTFSQKYHNRVTQHEAGHFLIAYLLGILPKGYTLTSLDALKKQGSLNIQAGTAFVDFEFIEEVNSGKVTATMLNRFSCIALAGVATEYLLFGYAEGGLSDINQLDALLKSLGFTQKKADSQVRWAVLNTILILRRHEKARVKLAEAMTRGKSVGVCIDIIE

SEQ ID NO: 164 - DNA, 625 bp, Arabidopsis thaliana
  misc_feature: Encodes the peptide sequence at SEQ ID NO. 165
atcttcatcgtttctcaatttcaaaactcagattaataaaattttcgcgttgttcctttctctcaattcatcgacgatgccgagcagatacccagaagcagtaacacaagactgggaaccagtagttctccacaaatcaaaacaaaagagccaagacctacgcgatccgaaagcggttaacgcagctctgagaaacggtgtcgcggttcaaacggttaagaaattcgatgccggttcgaacaaaaaggggaaatctacggcggttccggtgattaacacgaagaagctggaagaagaaacagagcctgcggcgatggatcgtgtgaaagcagaggtgaggttgatgatacagaaagcgagattggagaagaagatgtcacaagcggatttggcgaaacagatcaatgagaggactcaggtagttcaggaatatgagaatggtaaagctgttcctaatcaggctgtgcttgcgaagatggagaaggttctaggtgttaaacttaggggtaaaattgggaaatgattaaacgatgtcgtttatcttgtattttgttgaccaatgtaaaaagtaaaaaaaaagtcttgttgttttgtttgataaatgaaaaaacaatatatatctttt

SEQ ID NO: 165 - protein, 148 aa, Arabidopsis thaliana
  misc_feature: Ceres Clone ID no. 158734
  misc_feature (11)..(83): Pfam name: MBF1 Pfam desc: Multiprotein bridging factor 1
  misc_feature (91)..(145): Pfam name: HTH_3 Pfam desc: Helix-turn-helix
  misc_feature: in Figure 3
  misc_feature: Bit score of 326.4 for HMM based on sequences of Figure 3
MPSRYPEAVTQDWEPVVLHKSKQKSQDLRDPKAVNAALRNGVAVQTVKKFDAGSNKKGKSTAVPVINTKKLEEETEPAAMDRVKAEVRLMIQKARLEKKMSQADLAKQINERTQVVQEYENGKAVPNQAVLAKMEKVLGVKLRGKIGK

SEQ ID NO: 166 - protein, 139 aa, Chlamydomonas reinhardtii
  misc_feature (6)..(78): Pfam name: MBF1 Pfam desc: Multiprotein bridging factor 1
  misc_feature (86)..(137): Pfam name: HTH_3 Pfam desc: Helix-turn-helix
  misc_feature: Public GI ID no. 159483353
  misc_feature: in Figure 3
  misc_feature: Bit score of 260.8 for HMM based on sequences of Figure 3
  misc_feature: Functional Homolog Of Ceres Clone ID no. 158734 at SEQ ID NO. 165
MNMNSQDWDTVVLRKKQPTGAALKDEAAVNAARRQGAAVETSQKFNAGKNKPGAAQTVSGKPAAKLEQETEDFHHERVSSNLKQQIVQARTAKKMTQAQLAQAINEKPQVIQEYEQGKAIPNPQVLSKLSRALGVVLKK

SEQ ID NO: 167 - protein, 145 aa, Picea sitchensis
  misc_feature (11)..(79): Pfam name: MBF1 Pfam desc: Multiprotein bridging factor 1
  misc_feature (87)..(141): Pfam name: HTH_3 Pfam desc: Helix-turn-helix
  misc_feature: Public GI ID no. 116781877
  misc_feature: in Figure 3
  misc_feature: Bit score of 318.2 for HMM based on sequences of Figure 3
  misc_feature: Functional Homolog Of Ceres Clone ID no. 158734 at SEQ ID NO. 165
MPSRTNGPITQDWTPVVIHKRLQKASEARDPKAVNAAIRAGAQVQSIKKFEGGSNKKAQPPLNTRKLDEETEPAALQKVPAEIRHAIQKARLDQKLSQAELGKRINERAQVIQEYESGKAIPNQAILSKLEKVLGVKLRGKLNSH

SEQ ID NO: 168 - DNA, 626 bp, Papaver somniferum
  misc_feature: Ceres Clone ID no. 1628154
  misc_feature: Encodes the peptide sequence at SEQ ID NO. 169
agaacaaaagctctctctgctaaaacaaaacgaagaaaccctagatacaaactctcaaagaagaagaaagatgtcaggattcacacaagattgggaaccagttgtgatccgtaagaaagcaccaacatccgctgctaagaaagatgagaaagctgtgaacgctgccagacgtgccggtgcagagattgaaactgttaagaaatctactgcgggaacaaataaagctgcctccagcggaacttcattgaacacgaggaaacttgatgaagaaacagacgttcttgcgcatgaaagagtaccatctgaactaaagaaaaacatcatgcaggctcgtttggacaagaaaatgactcaatctcaacttgcacagctgatcaatgagaagccacaaattgtccaggagtatgaatctgggaaggccataccaaaccaacagataattacaaagctggaaagggttcttggtgtgaagctccgaggaaagaagtaaaacaaaatccgcagtgaagaaggatactgaaagtcttcagtagggttctctgttgctattattactaatatgaaacgaatttagttttcagtatccatgaatttgaaaaaacccctaaaaagtggggcgatgatgt

SEQ ID NO: 169 - protein, 139 aa, Papaver somniferum
  misc_feature (6)..(76): Pfam name: MBF1 Pfam desc: Multiprotein bridging factor 1
  misc_feature (84)..(138): Pfam name: HTH_3 Pfam desc: Helix-turn-helix
  misc_feature: Ceres Clone ID no. 1628154
  misc_feature: in Figure 3
  misc_feature: Bit score of 306.5 for HMM based on sequences of Figure 3
  misc_feature: Functional Homolog Of Ceres Clone ID no. 158734 at SEQ ID NO. 165
MSGFTQDWEPVVIRKKAPTSAAKKDEKAVNAARRAGAEIETVKKSTAGTNKAASSGTSLNTRKLDEETDVLAHERVPSELKKNIMQARLDKKMTQSQLAQLINEKPQIVQEYESGKAIPNQQIITKLERVLGVKLRGKK

SEQ ID NO: 170 - DNA, 826 bp, Gossypium hirsutum
  misc_feature: Ceres Clone ID no. 1836022
  misc_feature: Encodes the peptide sequence at SEQ ID NO. 171
gcatttctgaccaaggaagaaaaattctcttcctttttttattccttcctttttcctttcatccaatcgaccaaattcagagcttacaaaagaaaaatggccggaatcggacctttaacgcaagactgggagcccgtcgttattcggaaaaaacccccaaacgccgccaccaagaaggatgagaaagtcgttaacgccgcccgtcgagccggtgccgagatcgaatccgtcaagaaatcgaatgctggggcgaacaaggcagcatcgagtagcactactttgaatacaaggaaacttgatgaggaaactgaaaatcttgctcatgaaagagtgccaactgaactgaagaaagccatcatgcatgctcgaatggagaagaaactcacccagtctcaacttgctcagatgatcaatgaaaagccccagattatacaagagtacgaatccggaaaagctattcctaaccaacagattataggtaaactcgagagggcactcggtgcaaagctgcgagggaagaagtgaggagggtcttatcgttaatcaaacagaagttgaatatggggtccagttcttgagtcctaaaaaatggtgatgtaaataaatgcactctacagttactatggctcgcatgtaataacagcgtcttcgatgttatctgaagactatgactatgactgatgaaatgaagtgtgttcttgactgttgcaagggattctctgtgctatttatattttgcttttgtgaatttagagtaagacacactcctttgatgaacagatgatggtttctacaattagaaacaccaataaatttgttttggcgt

SEQ ID NO: 171 - protein, 142 aa, Gossypium hirsutum
  misc_feature (9)..(79): Pfam name: MBF1 Pfam desc: Multiprotein bridging factor 1
  misc_feature (87)..(141): Pfam name: HTH_3 Pfam desc: Helix-turn-helix
  misc_feature: Ceres Clone ID no. 1836022
  misc_feature: in Figure 3
  misc_feature: Bit score of 307.0 for HMM based on sequences of Figure 3
  misc_feature: Functional Homolog Of Ceres Clone ID no. 158734 at SEQ ID NO. 165
MAGIGPLTQDWEPVVIRKKPPNAATKKDEKVVNAARRAGAEIESVKKSNAGANKAASSSTTLNTRKLDEETENLAHERVPTELKKAIMHARMEKKLTQSQLAQMINEKPQIIQEYESGKAIPNQQIIGKLERALGAKLRGKK

SEQ ID NO: 172 - DNA, 438 bp, Populus balsamifera subsp. trichocarpa
  misc_feature: Ceres Annot ID no. 1477956
  misc_feature: Encodes the peptide sequence at SEQ ID NO. 173
atgccaagcagatcagcaggagtaataaagcaggactgggagccggtggtgatgcacaaggcgaagcccaagtcccaagaccttcgcgatccgaaggtagtgaaccatgccctccgatcgggtgctccagtccagacaatcaagaaattcgacgctgggtctaataagaaagcaacggcaccagtggtgaatgccaggaagttggaggaggagacggagccagcggcgttggacaggatttctacggaggtgaggcaggcgattcaaaaagcgcggctggagaagaagatgagccagacagagcttgctaagctgattaatgagcagccaaaggtggtgcaagagtatgagaatggaaaggcggtgcctaaccaagctattttggccaagatggagagagtgctaggcgtgaagcttagagggaagactggcaagtga

SEQ ID NO: 173 - protein, 145 aa, Populus balsamifera subsp. trichocarpa
  misc_feature (11)..(80): Pfam name: MBF1 Pfam desc: Multiprotein bridging factor 1
  misc_feature (88)..(142): Pfam name: HTH_3 Pfam desc: Helix-turn-helix
  misc_feature: Ceres Annot ID no. 1477956
  misc_feature: in Figure 3
  misc_feature: Bit score of 336.5 for HMM based on sequences of Figure 3
  misc_feature: Functional Homolog Of Ceres Clone ID no. 158734 at SEQ ID NO. 165
MPSRSAGVIKQDWEPVVMHKAKPKSQDLRDPKVVNHALRSGAPVQTIKKFDAGSNKKATAPVVNARKLEEETEPAALDRISTEVRQAIQKARLEKKMSQTELAKLINEQPKVVQEYENGKAVPNQAILAKMERVLGVKLRGKTGK

SEQ ID NO: 174 - DNA, 721 bp, Triticum aestivum
  misc_feature: Ceres Clone ID no. 1077443
  misc_feature: Encodes the peptide sequence at SEQ ID NO. 175
acgagaaaagagaaagagcgagagccgaggagaagataaaatctacaggaaaaacaggggagaggcagagagaacagaggcgaaggagcaatgccgacgggtcggatgagcggcaacatcacgcaggactgggagccggtggtcctgcggcgggcgaagcccaaggcggccgacctcaagtccgccaaggcggtgaaccaggcgctgcggacgggcgcgccggtggagacggtgcgcaaggcggcggcggggacgaacaagaatgcctccgccgcggccgtggcggcgcccgcgcggaagctggacgagatgacggagccggcggggctggggcgcgtgggcggcgacgtgcgcgcggccatccagaaggcgcgcgtcgccaaagggtggagccaggcggagctggccaagcgcgtcaacgagcgggcgcaggtggtgcaggagtacgagagcggcaaggccgtccctgtccaggccgtgctcgccaagatggagcgcgccctcgaggtcaagctccggggcaaggcggttggggcgcccgcgccgacaaagtgatggttcgtggggacatatcctgcctgtgaatttgtgatgaatggtagtaaatcggatctgtaaatctcgggttgctttgtggtagattgggctgtaagtcgtgcaaagtgatgtctagaagtctcatgtggaatttgatgctaaatcctattgttagctgatttac

SEQ ID NO: 175 - protein, 154 aa, Triticum aestivum
  misc_feature (12)..(83): Pfam name: MBF1 Pfam desc: Multiprotein bridging factor 1
  misc_feature (91)..(145): Pfam name: HTH_3 Pfam desc: Helix-turn-helix
  misc_feature: Ceres Clone ID no. 1077443
  misc_feature: in Figure 3
  misc_feature: Bit score of 309.0 for HMM based on sequences of Figure 3
  misc_feature: Functional Homolog Of Ceres Clone ID no. 158734 at SEQ ID NO. 165
MPTGRMSGNITQDWEPVVLRRAKPKAADLKSAKAVNQALRTGAPVETVRKAAAGTNKNASAAAVAAPARKLDEMTEPAGLGRVGGDVRAAIQKARVAKGWSQAELAKRVNERAQVVQEYESGKAVPVQAVLAKMERALEVKLRGKAVGAPAPTK

SEQ ID NO: 176 - protein, 142 aa, Ricinus communis
  misc_feature (9)..(79): Pfam name: MBF1 Pfam desc: Multiprotein bridging factor 1
  misc_feature (87)..(141): Pfam name: HTH_3 Pfam desc: Helix-turn-helix
  misc_feature: Public GI ID no. 1632831
  misc_feature: in Figure 3
  misc_feature: Bit score of 315.4 for HMM based on sequences of Figure 3
  misc_feature: Functional Homolog Of Ceres Clone ID no. 158734 at SEQ ID NO. 165
MAGVGPISQDWEPVVIRKKAPTAAAKKDEKVVNAARRAGAEIETLKKSNAGTNKAASSSTSLNTRKLDEETENLTHDRVPTELKKAIMQARMEKKFTQAQLAQMINEKPQIIQEYESGKAIPNQQIIGKLERALGVKLRGKK

SEQ ID NO: 177 - protein, 146 aa, Solanum lycopersicum
  misc_feature (11)..(80): Pfam name: MBF1 Pfam desc: Multiprotein bridging factor 1
  misc_feature (88)..(142): Pfam name: HTH_3 Pfam desc: Helix-turn-helix
  misc_feature: Public GI ID no. 5669634
  misc_feature: in Figure 3
  misc_feature: Bit score of 314.5 for HMM based on sequences of Figure 3
  misc_feature: Functional Homolog Of Ceres Clone ID no. 158734 at SEQ ID NO. 165
MPMRPTGGLKQDWDPIVLQKPKMKAQDLKDPKIVNQALRAGAQVQTVKKIDAGLNKKAATLAVNVRKLDEAAEPAALEKLPVDVRQAIQKARIEKKMSQADLAKKINERTQVVAEYENGKAVPNQLVLGKMENVLGVKLRGKIHKS

SEQ ID NO: 178 - DNA, 468 bp, Sorghum bicolor
  misc_feature: Ceres Annot ID no. 8743195
  misc_feature: Encodes the peptide sequence at SEQ ID NO. 179
atgccgacgggtaggctgagcggcaacatcacgcaggactgggagccggtggttctgcgccggacgaagccgaaggcggccgacctcaagtcggcgaaggcggtgaaccaggcgctgcggtcgggcgcggccgtggagacggtgcgcaagtcggcggcgggcacgaacaagcacttcgcgtccacgaccgtggcgcccgcgcgcaagctggacgagacgacggagccggcggcggtggagcgcgtggcggccgaggtgcgcgcggcgatccagaaggcgcgcgtggccaaagggtggagccaggccgagctggcgaagcgcatcaacgagcgcgcgcaggtggtgcaggagtacgagagcggcaaggcggcgccggcccaggccgtgctcgccaagatggagcgcgccctcgaggtcaagctccgtggcaagggcgtcggcgcgcccctggcggctgccagcaaatga

SEQ ID NO: 179 - protein, 155 aa, Sorghum bicolor
  misc_feature (12)..(82): Pfam name: MBF1 Pfam desc: Multiprotein bridging factor 1
  misc_feature (90)..(144): Pfam name: HTH_3 Pfam desc: Helix-turn-helix
  misc_feature: Ceres Annot ID no. 8743195
  misc_feature: in Figure 3
  misc_feature: Bit score of 317.2 for HMM based on sequences of Figure 3
  misc_feature: Functional Homolog Of Ceres Clone ID no. 158734 at SEQ ID NO. 165
MPTGRLSGNITQDWEPVVLRRTKPKAADLKSAKAVNQALRSGAAVETVRKSAAGTNKHFASTTVAPARKLDETTEPAAVERVAAEVRAAIQKARVAKGWSQAELAKRINERAQVVQEYESGKAAPAQAVLAKMERALEVKLRGKGVGAPLAAASK

SEQ ID NO: 180 - DNA, 587 bp, Zea mays
  misc_feature: Ceres P ID no. 101144543
  misc_feature: Encodes the peptide sequence at SEQ ID NO. 181
  misc_feature (13)..(13): n is a, c, t, g, unknown, or other
ccacgccgtccgnagcgcaatttaaatacaagggaaataagagtacagagatgccaactggtaggctgagcggcaacatcacccaggactgggagccggtggttctgcgccgtacgaagccgaaggcggcggacctcaagtcgtcgaaggcggtgaaccaggcgctgcggtcgggcgcagccgtggagacggtgcgcaagtcagcggcgggcatgaacaagcactccacgacggtggcgcccgcgcgtaagctggacgagacgacggaacccgcggcggtggagcgggtggctgtggaggtgcgcgcggcaatccagaaggcgcgcgtggccaagggatggagccaggcggagctggcgaagcgcatcaacgagcgcgcgcaggtggtgcaggagtacgagagcggcaaggcggcgccggcccaggccgtgcttgccaagatggagcgcgctctcgaggtcaagctccgtgggaagggcgtcggcgcgccactggcggccggcgggaagtgatctgatattctgatgtgatggacttgtgcagattgcaacgttgatagcttaacctcttttttgaatcggctggtt

SEQ ID NO: 181 - protein, 153 aa, Zea mays
  misc_feature (12)..(80): Pfam name: MBF1 Pfam desc: Multiprotein bridging factor 1
  misc_feature (88)..(142): Pfam name: HTH_3 Pfam desc: Helix-turn-helix
  misc_feature: Ceres P ID no. 101144543
  misc_feature: in Figure 3
  misc_feature: Bit score of 312.0 for HMM based on sequences of Figure 3
  misc_feature: Functional Homolog Of Ceres Clone ID no. 158734 at SEQ ID NO. 165
MPTGRLSGNITQDWEPVVLRRTKPKAADLKSSKAVNQALRSGAAVETVRKSAAGMNKHSTTVAPARKLDETTEPAAVERVAVEVRAAIQKARVAKGWSQAELAKRINERAQVVQEYESGKAAPAQAVLAKMERALEVKLRGKGVGAPLAAGGK

SEQ ID NO: 182 - DNA, 693 bp, Musa acuminata
  misc_feature: Ceres Clone ID no. 1732715
  misc_feature: Encodes the peptide sequence at SEQ ID NO. 183
aacctctcgttcctccgctggtcgcaaaaatctcgcctttgaaaccctaacctcgatccgagaggcgacgtcgatggccgggactggtccgatcgcgcaggactgggagcccgttgtgctccgcaagaaggcgcccaccgccgccgccaagaaggacgagaaggccgtcaacgccgcccgccgcagcggggccgacatcgagaccgtcaagaagtctaatgccggcacgaacaaggctgcttcaagcagcacgaccctgaatacaaggaagctggatgaggaaaccgagaacctttctcatgggcgagtgccgtctgaactgaagaaaaatctcatgcaagctcggctggacaagaagctaacccaggctcaacttgcacagcaaatcaatgagaagccccaagtgattcaagaatacgagtcagggaaggccattccaaatcaacagataattaccaaactggaaagggtgctcggggtgaagcttcgaggtaaaaagtagggagcaccacaccgccgtactaaaacgactatgataaggagatttcatatgcagggtctggctctgctccgcatgattgtggtttggcaccatgcatatttctctagtaataataagggcatgtttaactctttctatgtggttgctttgtctgtgacttgatatcagtttgagatcccatgtttgagtat

SEQ ID NO: 183 - protein, 142 aa, Musa acuminata
  misc_feature (9)..(79): Pfam name: MBF1 Pfam desc: Multiprotein bridging factor 1
  misc_feature (87)..(141): Pfam name: HTH_3 Pfam desc: Helix-turn-helix
  misc_feature: Ceres Clone ID no. 1732715
  misc_feature: in Figure 3
  misc_feature: Bit score of 315.0 for HMM based on sequences of Figure 3
  misc_feature: Functional Homolog Of Ceres Clone ID no. 158734 at SEQ ID NO. 165
MAGTGPIAQDWEPVVLRKKAPTAAAKKDEKAVNAARRSGADIETVKKSNAGTNKAASSSTTLNTRKLDEETENLSHGRVPSELKKNLMQARLDKKLTQAQLAQQINEKPQVIQEYESGKAIPNQQIITKLERVLGVKLRGKK

SEQ ID NO: 184 - protein, 144 aa, Vitis vinifera
  misc_feature (11)..(79): Pfam name: MBF1 Pfam desc: Multiprotein bridging factor 1
  misc_feature (87)..(141): Pfam name: HTH_3 Pfam desc: Helix-turn-helix
  misc_feature: Public GI ID no. 157342830
  misc_feature: in Figure 3
  misc_feature: Bit score of 336.4 for HMM based on sequences of Figure 3
  misc_feature: Functional Homolog Of Ceres Clone ID no. 158734 at SEQ ID NO. 165
MPNRFPGALSQDWEPVVLHKSKPKAQELRDPKAVNKAIRSGAPVQTLKKFDGGANKKAAPIMNTRKLDEGTEPAALDRVSVDVRQLIQKARLEKKMSQAELAKLINERPQVVQEYENGKAVPNQAVLAKMEKVLGVKLRGKISK

SEQ ID NO: 185 - protein, 155 aa, Oryza sativa subsp. japonica
  misc_feature (12)..(81): Pfam name: MBF1 Pfam desc: Multiprotein bridging factor 1
  misc_feature (89)..(143): Pfam name: HTH_3 Pfam desc: Helix-turn-helix
  misc_feature: Public GI ID no. 115468750
  misc_feature: in Figure 3
  misc_feature: Bit score of 310.7 for HMM based on sequences of Figure 3
  misc_feature: Functional Homolog Of Ceres Clone ID no. 158734 at SEQ ID NO. 165
MPTGRLSGNITQDWEPVVLRRTKPKAADLKSTRAVNQAMRTGAPVETVRKAAAGTNKAAAGAAAPARKLDESTEPAGLGRVGAEVRGAIQKARVAKGWSQAELAKRINERAQVVQEYESGKAVPVQAVLAKMERALEVKLRGKAVGAPAAPAGAK

SEQ ID NO: 186 - protein, 151 aa, Picea sitchensis
  misc_feature (9)..(79): Pfam name: MBF1 Pfam desc: Multiprotein bridging factor 1
  misc_feature (87)..(141): Pfam name: HTH_3 Pfam desc: Helix-turn-helix
  misc_feature: Public GI ID no. 116785703
  misc_feature: Bit score of 306.2 for HMM based on sequences of Figure 3
  misc_feature: Functional Homolog Of Ceres Clone ID no. 158734 at SEQ ID NO. 165
MAGVGPISQDWEPVVIRKKAPNAAAKKDEKAVNAARRTGGPIETIKKFNAGSNKAASSSTTLNTRKLDDETEVLAHERVSTDLKKNIMQARLDKKLTQAQLAQQINEKPQIIQEYESGKAIPNQQIIAKLERVLSVKLRGTSGTSGTSGKK

SEQ ID NO: 187 - DNA, 578 bp, Gossypium hirsutum
  misc_feature: Ceres Clone ID no. 1833747
  misc_feature: Encodes the peptide sequence at SEQ ID NO. 188
aaaaaacctcacctttttcatttgacaaacaatggccggaatcggacctttaacccaagactgggaacccgttgttattcgtaaaaaagccccaaccgccgccgccaagaaggatgagaaagtcgtaaacgccgctcgtcgtgctggtgccgagatcgaatccgtcaaaaaatcaaatgctgggacgaacagggccgcatcaagtagtacatctctgaacacaaggaagcttgatgaagaaactgaaaatcttgctcatgatcgagtgccaaccgaactgaagaaagccatcatgcatgctcgaatggaaaagaaacttacccaagcacaacttgctcagttgatcaatgagaaacctcagatcatacaagagtacgaatctggaaaagccattcctaaccaacagataatcggtaaactcgagagggctcttggtgcaaagctgcgaggtaagaagtaaggcgagagttgggtcttttttccttttgtggtgtaaatgaatgttctctaccattatggttttgcttgtaagaacagtgttttggactttgtggtgaccatgaaatgaagtgtgttct

SEQ ID NO: 188 - protein, 142 aa, Gossypium hirsutum
  misc_feature (9)..(79): Pfam name: MBF1 Pfam desc: Multiprotein bridging factor 1
  misc_feature (87)..(141): Pfam name: HTH_3 Pfam desc: Helix-turn-helix
  misc_feature: Ceres Clone ID no. 1833747
  misc_feature: Bit score of 308.2 for HMM based on sequences of Figure 3
  misc_feature: Functional Homolog Of Ceres Clone ID no. 158734 at SEQ ID NO. 165
MAGIGPLTQDWEPVVIRKKAPTAAAKKDEKVVNAARRAGAEIESVKKSNAGTNRAASSSTSLNTRKLDEETENLAHDRVPTELKKAIMHARMEKKLTQAQLAQLINEKPQIIQEYESGKAIPNQQIIGKLERALGAKLRGKK

SEQ ID NO: 189 - DNA, 706 bp, Gossypium hirsutum
  misc_feature: Ceres Clone ID no. 1896466
  misc_feature: Encodes the peptide sequence at SEQ ID NO. 190
aatccatttattattaccaacttctcaaaaatatcttttctctctttcatccaaaatacccaaaagtcaagagtagattaaactaatggccggaatcggacctttgactcaagattgggagcccgttgttattcgtaaaaaagcccctaccgccgccgccaagaaggatgagaaagtcgttaacgccgcccgccgtgccggtgccgagatcgagtccataaaaaaatcaaatgctgggacgaatagggcggcatcaagtagtacttctttgaacacaaggaagctcgatgaagacactgagaatcttgctcatgaccgagtgccaactgagctaaagaaagccatcatgcaagctcgaatggataagaaacttacccaggctcaacttgctcagatgatcaatgagaagcctcagattatacaggagtatgaatccggaaaagccatccctaaccaacaaataattggtaaactggagagggctcttggtgcgaagctgcgagggaagaagtgagtgagtaggagtctcgtagaaagaacaaacagaacttgaatatcgcccagaatcttgagtcctaaaacttggtgatgtaaatgaatgttttatgccgttatgggtcgcttgtaagaacactgtttttgactttgtgtgatgacttatgtctgcgactgcttatgaaatgaagtttgtgtgtgttcttgactg

SEQ ID NO: 190 - protein, 142 aa, Gossypium hirsutum
  misc_feature (9)..(79): Pfam name: MBF1 Pfam desc: Multiprotein bridging factor 1
  misc_feature (87)..(141): Pfam name: HTH_3 Pfam desc: Helix-turn-helix
  misc_feature: Ceres Clone ID no. 1896466
  misc_feature: Bit score of 307.2 for HMM based on sequences of Figure 3
  misc_feature: Functional Homolog Of Ceres Clone ID no. 158734 at SEQ ID NO. 165
MAGIGPLTQDWEPVVIRKKAPTAAAKKDEKVVNAARRAGAEIESIKKSNAGTNRAASSSTSLNTRKLDEDTENLAHDRVPTELKKAIMQARMDKKLTQAQLAQMINEKPQIIQEYESGKAIPNQQIIGKLERALGAKLRGKK

SEQ ID NO: 191 - DNA, 429 bp, Populus balsamifera subsp. trichocarpa
  misc_feature: Ceres Annot ID no. 1482906
  misc_feature: Encodes the peptide sequence at SEQ ID NO. 192
atgtcaggaggtggaccaatctcacaggactgggaacccgtagtgatccgcaagaaagctcccaacgccgccgccaagaaggatgagaaggccgtcaacgccgcccgccgctccggtgccgagatcgaaaccatcaaaaaatcaactgctggtacgaacaaggctgcttctagcagcacttctttgaacacaaggaagctcgatgaagaaacagagaaccttgctcatgaccgagtgccaactgaactgaagaaagcaattatgcagggtagaacggacaagaaacttacccaggctcaacttgcacagttgatcaacgagaagccccagataattcaggagtatgaatccggaaaagccattcctaatcagcagattataggcaaactggagagggctcttggtgtgaagctgcggggaaagaagtga

SEQ ID NO: 192 - protein, 142 aa, Populus balsamifera subsp. trichocarpa
  misc_feature (9)..(79): Pfam name: MBF1 Pfam desc: Multiprotein bridging factor 1
  misc_feature (87)..(141): Pfam name: HTH_3 Pfam desc: Helix-turn-helix
  misc_feature: Ceres Annot ID no. 1482906
  misc_feature: Bit score of 310.1 for HMM based on sequences of Figure 3
  misc_feature: Functional Homolog Of Ceres Clone ID no. 158734 at SEQ ID NO. 165
MSGGGPISQDWEPVVIRKKAPNAAAKKDEKAVNAARRSGAEIETIKKSTAGTNKAASSSTSLNTRKLDEETENLAHDRVPTELKKAIMQGRTDKKLTQAQLAQLINEKPQIIQEYESGKAIPNQQIIGKLERALGVKLRGKK

SEQ ID NO: 193 - protein, 140 aa, Populus balsamifera subsp. trichocarpa
  misc_feature (7)..(77): Pfam name: MBF1 Pfam desc: Multiprotein bridging factor 1
  misc_feature (85)..(139): Pfam name: HTH_3 Pfam desc: Helix-turn-helix
  misc_feature: Public GI ID no. 118485147
  misc_feature: Bit score of 308.1 for HMM based on sequences of Figure 3
  misc_feature: Functional Homolog Of Ceres Clone ID no. 158734 at SEQ ID NO. 165
MSGPISQDWEPVVIRKKAPNAAAKKDEKAVNAARRAGAEIETVKKSTAGTNKAASSSTSLNTRKLDDETENLTHDRVPTELKKAIMQARMDKKLTQAQLAQVINEKPQIIQEYESGKAIPNQQIIGKLERALGVKLRGKK

SEQ ID NO: 194 - DNA, 456 bp, Populus balsamifera subsp. trichocarpa
  misc_feature: Ceres Annot ID no. 1519958
  misc_feature: Encodes the peptide sequence at SEQ ID NO. 195
atgtcaggaccaatctcacaggactgggagccggtggtgatccgtaagaaagctcccaacgccgccgccaagaaggatgagaaggccgtcaacgccgcccgccgcgctggtgctgagatcgaaaccgtcaaaaaatcaactgctggtacaaacaaggccgcttctagcagcacttctttgaacacaaggaagctcgatgacgaaacagagaaccttactcaaaaactttctaaaacattctggtctcccacagatgaccgagtgccaactgaactgaagaaagcaattatgcaggctagaatggacaagaaacttacccaggctcaacttgcacaggtgatcaatgagaagccccagataattcaggagtatgaatctggaaaagccattcctaatcagcagattataggaaaactggagagggctcttggtgtgaagctacggggaaagaagtag

SEQ ID NO: 195 - protein, 151 aa, Populus balsamifera subsp. trichocarpa
  misc_feature (7)..(79): Pfam name: MBF1 Pfam desc: Multiprotein bridging factor 1
  misc_feature (96)..(150): Pfam name: HTH_3 Pfam desc: Helix-turn-helix
  misc_feature: Ceres Annot ID no. 1519958
  misc_feature: Bit score of 288.7 for HMM based on sequences of Figure 3
  misc_feature: Functional Homolog Of Ceres Clone ID no. 158734 at SEQ ID NO. 165
MSGPISQDWEPVVIRKKAPNAAAKKDEKAVNAARRAGAEIETVKKSTAGTNKAASSSTSLNTRKLDDETENLTQKLSKTFWSPTDDRVPTELKKAIMQARMDKKLTQAQLAQVINEKPQIIQEYESGKAIPNQQIIGKLERALGVKLRGKK

SEQ ID NO: 196 - DNA, 621 bp, Populus balsamifera subsp. trichocarpa
  misc_feature: Ceres Annot ID no. 1466623
  misc_feature: Encodes the peptide sequence at SEQ ID NO. 197
atgtcaggaccaatctcacaggactgggagccggtggtgatccgtaagaaagctcccaacgccgccgccaagaaggatgagaaggccgtcaacgccgcccgccgcgctggtgctgagatcgaaaccgtcaaaaaatcaactgctggtacaaacaaggccgcttctagcagcacttctttgaacacaaggaagctcgatgacgaaacagagaaccttactcaaaaactttctaaaacattctggtctcccacagatgaccgagtgccaactgaactgaagaaagcaattatgcaggctagaatggacaagaaacttacccaggctcaacttgcacaggtgatcaatgagaagccccagataattcaggagtatgaatctggaaaagccattcctaatcagcagattataggaaaactggagagggctcttggtgtgaagctacggggaaagaaattgacccggtcgatctggtggctggaccagaccgggtttactaaaagaccggctggggcaacagcccggttaaaccccgggcgacccggcgggtcgatccatgacccgggcgaaacaggacgagacctgatttttttttcttcaaatgtgagatttgaaacccattag

SEQ ID NO: 197 - protein, 206 aa, Populus balsamifera subsp. trichocarpa
  misc_feature (7)..(79): Pfam name: MBF1 Pfam desc: Multiprotein bridging factor 1
  misc_feature (96)..(150): Pfam name: HTH_3 Pfam desc: Helix-turn-helix
  misc_feature: Ceres Annot ID no. 1466623
  misc_feature: Bit score of 288.7 for HMM based on sequences of Figure 3
  misc_feature: Functional Homolog Of Ceres Clone ID no. 158734 at SEQ ID NO. 165
MSGPISQDWEPVVIRKKAPNAAAKKDEKAVNAARRAGAEIETVKKSTAGTNKAASSSTSLNTRKLDDETENLTQKLSKTFWSPTDDRVPTELKKAIMQARMDKKLTQAQLAQVINEKPQIIQEYESGKAIPNQQIIGKLERALGVKLRGKKLTRSIWWLDQTGFTKRPAGATARLNPGRPGGSIHDPGETGRDLIFFSSNVRFETH

SEQ ID NO: 198 - protein, 148 aa, Arabidopsis thaliana
  misc_feature (11)..(83): Pfam name: MBF1 Pfam desc: Multiprotein bridging factor 1
  misc_feature (91)..(145): Pfam name: HTH_3 Pfam desc: Helix-turn-helix
  misc_feature: Public GI ID no. 15230125
  misc_feature: Bit score of 329.0 for HMM based on sequences of Figure 3
  misc_feature: Functional Homolog Of Ceres Clone ID no. 158734 at SEQ ID NO. 165
MPSRYPGAVTQDWEPVVLHKSKQKSQDLRDPKAVNAALRNGVAVQTVKKFDAGSNKKGKSTAVPVINTKKLEEETEPAAMDRVKAEVRLMIQKARLEKKMSQADLAKQINERTQVVQEYENGKAVPNQAVLAKMEKVLGVKLRGKIGK

SEQ ID NO: 199 - DNA, 1112 bp, Arabidopsis thaliana
  misc_feature: Ceres Clone ID no. 39345
  misc_feature: Encodes the peptide sequence at SEQ ID NO. 200
aaagaagaagagaatggatctagaatcggtgaaaaagtatctggaaggagatgaagacgaaaaggccaaggaaccaatggtggcgaaattaccacacagattcctcgaacgattcgtaaccaatggtcttaaagtggatctcatcgaacctggccgtatcgtctgctccatgaaaatccctcctcatctgaacgcagggaaattcttacacggaggagcaacggcgacgctggtggatttgataggatcagcagtgatttacacagccggagcttcacattccggagtttcagtggagatcaatgtttcatacctcgatgctgcttttctcgatgaagagatagagatagaatcgaggtatgaaaacagttgaagaaagaaaatcacaagagaagccatggccggaattggaccgattactcaggattgggaaccagttgtgatccgcaagagagctcctaacgctgcagctaagcgcgacgagaagactgtcaacgccgctcgtcgaagcggcgccgatattgagaccgttcgaaaattcaatgctggatcgaacaaggctgcatcaagcggcacctccttgaacacaaagaagctagatgatgatactgagaacttatctcatgatcgtgtgcccactgaattgaagaaagccatcatgcaagctagaggggagaagaagctgactcagtcccaacttgcccatctgatcaatgagaagccacaagtgatccaagaatacgagtcggggaaagcaattccgaatcaacagatcctttcaaagctggagagggcacttggtgctaaactccgtggaaagaagtagaagtttagaacaaagctcttaaaggtaacaacaaaagctgatcgcagtttctctccagtccacatgctttaccatatcctaaaaactatatctatgtatggtttggtttaatggcgtagtagtttgttgcgaggaatctttcatgatgtaagaaaaacaaagctgtttggaaccttttgtcattataaataatctcttctctttctttttcgtcatgtctcgtaaactttatctgccacggatgtatgttcttaaagaaattgaagattgaaattgatcaattgcc

SEQ ID NO: 200 - protein, 142 aa, Arabidopsis thaliana
  misc_feature (9)..(79): Pfam name: MBF1 Pfam desc: Multiprotein bridging factor 1
  misc_feature (87)..(141): Pfam name: HTH_3 Pfam desc: Helix-turn-helix
  misc_feature: Ceres Clone ID no. 39345
  misc_feature: Bit score of 301.7 for HMM based on sequences of Figure 3
  misc_feature: Functional Homolog Of Ceres Clone ID no. 158734 at SEQ ID NO. 165
MAGIGPITQDWEPVVIRKRAPNAAAKRDEKTVNAARRSGADIETVRKFNAGSNKAASSGTSLNTKKLDDDTENLSHDRVPTELKKAIMQARGEKKLTQSQLAHLINEKPQVIQEYESGKAIPNQQILSKLERALGAKLRGKK

SEQ ID NO: 201 - DNA, 787 bp, Brassica napus
  misc_feature: Ceres Clone ID no. 946651
  misc_feature: Encodes the peptide sequence at SEQ ID NO. 202
gttctcaatttcagaaacttatcattatcatcatctctctgagacatcaagttttaaacaacagcgacgatgccgagcagatacccaggagccgtgacgcaagactgggagccagtggtgctccacaaaactaagccaaagagccaagacctccgtaatcccaaggcggttaacgcggctctcagaagcggcttagcggttcagacggtgaagaaattcgacgccggttcgaacaagaaggggaaatcgacggctgtgccggtgatcaacacgaagaagctggaggaagagacggagccgtcggcgatggatagggtgaaagcggaggtgaggctagcgatacagaaagctcggttggagaagaagatgtcacaagcggatctagcgaaacagatcaacgagcggacacaggtggttcaagaatacgaaaacgggaaagctgttcctaaccaggccgtacttgccaagattgagaaggttctaggtgttaaactcaggggtaaacatgtcaaataattcaaaacgatgccgtctctggtttcgttcttccttcttttgggtgcacatcttcctattctcaatcttatgaatataaataataacgcttttggcttcgtattcaaacgacatcgtatctgccaaacgattgtcaaatttaaaaaggaaatggatttgttctgtttgagttacttgaatttcttcatacatgagtcatgactggtctaaatatttattctttgcatgtataatgtattcctgtaatcaacaagattaaaaatcctttttt

SEQ ID NO: 202 - protein, 148 aa, Brassica napus
  misc_feature (11)..(83): Pfam name: MBF1 Pfam desc: Multiprotein bridging factor 1
  misc_feature (91)..(145): Pfam name: HTH_3 Pfam desc: Helix-turn-helix
  misc_feature: Ceres Clone ID no. 946651
  misc_feature: Bit score of 318.4 for HMM based on sequences of Figure 3
  misc_feature: Functional Homolog Of Ceres Clone ID no. 158734 at SEQ ID NO. 165
MPSRYPGAVTQDWEPVVLHKTKPKSQDLRNPKAVNAALRSGLAVQTVKKFDAGSNKKGKSTAVPVINTKKLEEETEPSAMDRVKAEVRLAIQKARLEKKMSQADLAKQINERTQVVQEYENGKAVPNQAVLAKIEKVLGVKLRGKHVK

SEQ ID NO: 203 - DNA, 605 bp, Brassica napus
  misc_feature: Ceres Clone ID no. 1085665
  misc_feature: Encodes the peptide sequence at SEQ ID NO. 204
gaaaggaaaccctaagattgcacaaaggagacgaaagcatggcaggaactggaccgatgactcaggactgggagcccgtggtgatccgcaagagagcccctaactccgccgccaagcgcgacgagaaaactgtcaacgccgctcgtcgcgccggcgccgatatcgaaaccgtccgaaaatataatgctggaacgaacaaggcagcatcaagcagcacttctctcaacacaaagacgcttgatgacgacactgagaaccttactcatgagcgtgtgcctactgagctaaagaaagctattatgcaagcccgcactgagaagaagctaacccagtcccaacttgctcaactcatcaatgagaagccacaagtgatccaagagtacgagtctggtaaagctatccccaaccagcagatcctttctaagctcgagagagctcttggtgctaaactccgtggaaagaagtgatgaatgatcaagtcctcatgaagattaacaaaaatcttaatcgctctttcacttttcttaatgactatgtggtaaacaacaatctgtgctttcatgtaatgtcgtcaactctttgccaagagtaaccgtttgaaagtt

SEQ ID NO: 204 - protein, 142 aa, Brassica napus
  misc_feature (9)..(79): Pfam name: MBF1 Pfam desc: Multiprotein bridging factor 1
  misc_feature (87)..(141): Pfam name: HTH_3 Pfam desc: Helix-turn-helix
  misc_feature: Ceres Clone ID no. 1085665
  misc_feature: Bit score of 296.5 for HMM based on sequences of Figure 3
  misc_feature: Functional Homolog Of Ceres Clone ID no. 158734 at SEQ ID NO. 165
MAGTGPMTQDWEPVVIRKRAPNSAAKRDEKTVNAARRAGADIETVRKYNAGTNKAASSSTSLNTKTLDDDTENLTHERVPTELKKAIMQARTEKKLTQSQLAQLINEKPQVIQEYESGKAIPNQQILSKLERALGAKLRGKK

SEQ ID NO: 205 - DNA, 748 bp, Glycine max
  misc_feature: Ceres Clone ID no. 474636
  misc_feature: Encodes the peptide sequence at SEQ ID NO. 206
aaatccttttctgtttgctccatccaaatacagaaatatcattttccgagacaatcccatcttccatttccatcttcaatatttcttctcatcgagaagcttcgcgaacgaaaacaaagaaccctagacagatccattccatagccatgtcaggtgttggccctctatctcaggattgggaacccgtcgtcctccgcaagaaggctcccaccgccgccgccaagaaggacgagaaagccgtcaacgccgcccggcgctccggcgcggaaattgaaaccctaaaaaagtataatgctgggacaaataaagcagcatctagcagcacttcattgaacactaagaggctggatgatgatactgagaatctagctcatgagaaggtaccaactgaacttaagaaggctataatgcaagctaggatggacaagaaactcactcaggctcagcttgctcaactgatcaatgagaagcctcaagtgatccaggagtacgagtcagggaaggccattccaaaccagcagataattgggaagttggaaagggctcttggagcaaaattgcgtggcaagaaataaattaaactaatgctatggttttgcatgtagcttggtttacatatcactaactcactatgggagtgttatgtgtttgctcgctaattgtgtaatatgtaagacaattaaatggttgtgaggacctgtggctttcacctgtcacctgttcgactaaataaagttgcaattagtat

SEQ ID NO: 206 - protein, 142 aa, Glycine max
  misc_feature (9)..(79): Pfam name: MBF1 Pfam desc: Multiprotein bridging factor 1
  misc_feature (87)..(141): Pfam name: HTH_3 Pfam desc: Helix-turn-helix
  misc_feature: Ceres Clone ID no. 474636
  misc_feature: Bit score of 301.9 for HMM based on sequences of Figure 3
  misc_feature: Functional Homolog Of Ceres Clone ID no. 158734 at SEQ ID NO. 165
MSGVGPLSQDWEPVVLRKKAPTAAAKKDEKAVNAARRSGAEIETLKKYNAGTNKAASSSTSLNTKRLDDDTENLAHEKVPTELKKAIMQARMDKKLTQAQLAQLINEKPQVIQEYESGKAIPNQQIIGKLERALGAKLRGKK

SEQ ID NO: 207 - DNA, 733 bp, Glycine max
  misc_feature: Ceres Clone ID no. 1614765
  misc_feature: Encodes the peptide sequence at SEQ ID NO. 208
aaaacacagaaatatcattttgcgaggcaatcccattctcatcttccatttccaccatcaatactattttcttgtcgttgagaagcttcgcgaacgaaagcaaagaaccctagaccgtcacagaaccattccatagccatgtctggtgttggccctctttctcaggattgggaacctgtcgtcctccgcaagaaggctcccaccgccgccgccaagaaggacgagaaagccgtcaacgccgcccgccgctctggcgccgaaatcgaaaccctaaaaaagtataatgctgggacaaacaaagcagcatctagcggcacttcattgaacactaagaggctggatgatgatactgagagtctagctcatgagaaggtgccaactgaacttaagaaggctataatgcaagctaggatggacaaaaagcttactcagtctcagcttgctcaactgatcaatgagaagcctcaagtgatccaggagtatgagtcagggaaggccattccaaaccagcagataattagcaagttggaaagagctcttggagctaaactgcgtggcaagaaataagttgtaactaatgtcatggttgtgcatgtagcttggtttgcatgtcactaactcactatggaactgttatgtttgctagccaattgtgtaatatgtaagacagataaatgggtgtgagggactgtggctttcacctggtcgagtaaataagttgcactttcagtac

SEQ ID NO: 208 - protein, 142 aa, Glycine max
  misc_feature (9)..(79): Pfam name: MBF1 Pfam desc: Multiprotein bridging factor 1
  misc_feature (87)..(141): Pfam name: HTH_3 Pfam desc: Helix-turn-helix
  misc_feature: Ceres Clone ID no. 1614765
  misc_feature: Bit score of 300.0 for HMM based on sequences of Figure 3
  misc_feature: Functional Homolog Of Ceres Clone ID no. 158734 at SEQ ID NO. 165
MSGVGPLSQDWEPVVLRKKAPTAAAKKDEKAVNAARRSGAEIETLKKYNAGTNKAASSGTSLNTKRLDDDTESLAHEKVPTELKKAIMQARMDKKLTQSQLAQLINEKPQVIQEYESGKAIPNQQIISKLERALGAKLRGKK

SEQ ID NO: 209 - DNA, 788 bp, Triticum aestivum
  misc_feature: Ceres Clone ID no. 1027534
  misc_feature: Encodes the peptide sequence at SEQ ID NO. 210
accgattgcgactcgagaacctttcgttcatctccaaaatatcttcctcctctgttctgcgcctccagccctccactatcccttgcgtggttttagtctgtgaactcgagagaccgagcgaggaaagttgccgtgtgagacctgaaagttagggagatatggctgggattggtcctatcaggcaggactgggagccgatagtggcgcggaagaaggcgcagaacgccgccgacaagaaggacgaaaaggccgtcaacgctgcccgccgctccggcgccgagatcgacaccaccaagaagtacaacgctggaacgaacaaggctgcatctagcggaacttccctcaacaccaagcggctcgacgacgacacggagaacctttcccatgagcgtgtttcaagtgacctgaagaaaaaccttatgcaagcaagactggataagaagatgacccaggcacaacttgctcagatgatcaatgagaagccacaggtgatccaggagtacgagtcgggcaaggcgattccgaacaatcagataattggaaagctcgagagggcacttggagctaagctgcgtagcaagaagtaatgccttgaaggccaagccctgtctatttgccttacactgcatttgctaggtcctaaaagctcttacaggctgtttctgttggttgatactgaataactatgccacagaacgactttatgtatcattatattcccgtgttctaaaatgtgtcgtcatatgacccagtgtaagagctgcattgagcatgcagattgacatggc

SEQ ID NO: 210 - protein, 142 aa, Triticum aestivum
  misc_feature (9)..(79): Pfam name: MBF1 Pfam desc: Multiprotein bridging factor 1
  misc_feature (87)..(141): Pfam name: HTH_3 Pfam desc: Helix-turn-helix
  misc_feature: Ceres Clone ID no. 1027534
  misc_feature: Bit score of 281.6 for HMM based on sequences of Figure 3
  misc_feature: Functional Homolog Of Ceres Clone ID no. 158734 at SEQ ID NO. 165
MAGIGPIRQDWEPIVARKKAQNAADKKDEKAVNAARRSGAEIDTTKKYNAGTNKAASSGTSLNTKRLDDDTENLSHERVSSDLKKNLMQARLDKKMTQAQLAQMINEKPQVIQEYESGKAIPNNQIIGKLERALGAKLRSKK

SEQ ID NO: 211 - DNA, 663 bp, Glycine max
  misc_feature: Ceres Clone ID no. 1049407
  misc_feature: Encodes the peptide sequence at SEQ ID NO. 212
attattttcttgtcgttgagaagcttcgcgaacaaaagcaaagaaccctagacagtcacagaaccattccatagaaatgtcaggtgttggccctctttsksaagattgggaacccgtcgtcctccgcaagaaggctcccactgccgccgccaagaaggatgagaaagccgtcaacgccgcccgccgctccggcgccgaaatcgaaaccctaaaaaaatataatgctgggacaaataaagcagcatctagcagcacttcattgaacactaagaggctggatgatgatactgagagtctagctcatgagaaggtaccaactgaacttaagaaggccataatgcaagctaggatggacaagaaacttactcagtctcagcttgctcaactgatcaatgagaagcctcaagtgatccaggagtacgagtcaggaaaggccattccaaaccagcagataattggcaagttggaaagagcccttggagctaaattgcgtggcaagaaataaggaacttaatgtcatgttgcgcgtttattttgctatgcatgtcactatgggagtgttttgtgtttgttagctaattgtgtatatttaagacagttaaaatggttgtgttgacatgtgcctttytcctgttcggataaataaagttgcattttcagtat

SEQ ID NO: 212 - protein, 142 aa, Glycine max
  misc_feature (9)..(79): Pfam name: MBF1 Pfam desc: Multiprotein bridging factor 1
  misc_feature (87)..(141): Pfam name: HTH_3 Pfam desc: Helix-turn-helix
  misc_feature: Ceres Clone ID no. 1049407
  misc_feature: Bit score of 292.9 for HMM based on sequences of Figure 3
  misc_feature: Functional Homolog Of Ceres Clone ID no. 158734 at SEQ ID NO. 165
  misc_feature (8)..(8): Xaa is any aa, unknown, or other
  misc_feature (9)..(9): Xaa is any aa, unknown, or other
MSGVGPLXXDWEPVVLRKKAPTAAAKKDEKAVNAARRSGAEIETLKKYNAGTNKAASSSTSLNTKRLDDDTESLAHEKVPTELKKAIMQARMDKKLTQSQLAQLINEKPQVIQEYESGKAIPNQQIIGKLERALGAKLRGKK

SEQ ID NO: 213 - DNA, 792 bp, Triticum aestivum
  misc_feature: Ceres Clone ID no. 1075173
  misc_feature: Encodes the peptide sequence at SEQ ID NO. 214
aaccccgatcattcgcaccgaccacatcctcatcgtctccaacctcggcgaaaccctagcctagccccgccgaatcgcgagtccccccgaagccggagcaagccgagatgtcccgcaccggaccgatcgcccaggactgggagccggtggtcgtgcgcaagaagctgcccaacgccgccgccaagaaggacgagaaggccgtcaacgccgcccgccgcgccggcgtcgacatcgacatcgccaagaagcataatgctgggacaaacaaagctgctcataccaccacatcgctcaatacaaagaggcttgatgatgatacagagaatcttgctcatgagcgtgtgccgtcagacctgaagaagagcattatgcaggctagaacggacaagaagctcacacaggcacagcttgcacagctgatcaatgagaagccacaagtcatccaggagtacgagtcaggcaaggctatcccaaaccaacagatcatcggcaagctggaaagggctcttggcacaaagctgcgaggcaagaagtgaagctgcgtgtgcatctgacaggagtcgaggctttcaagagagcttggctgggcaagtttaccgctaaataaagcttgtctactaaatcatgcgacttaagaaaaccccggagtttggtatttcgctcaggtttgggtgaatgtaattattagcttctgtgaacaactctgtatctgggtttcgtttcgtcagcgtgtcttcgtgaatgtgaactgttctgaatgcctgaacctttatataacttgtctctgttgcc

SEQ ID NO: 214 - protein, 142 aa, Triticum aestivum
  misc_feature (9)..(79): Pfam name: MBF1 Pfam desc: Multiprotein bridging factor 1
  misc_feature (87)..(141): Pfam name: HTH_3 Pfam desc: Helix-turn-helix
  misc_feature: Ceres Clone ID no. 1075173
  misc_feature: Bit score of 281.8 for HMM based on sequences of Figure 3
  misc_feature: Functional Homolog Of Ceres Clone ID no. 158734 at SEQ ID NO. 165
MSRTGPIAQDWEPVVVRKKLPNAAAKKDEKAVNAARRAGVDIDIAKKHNAGTNKAAHTTTSLNTKRLDDDTENLAHERVPSDLKKSIMQARTDKKLTQAQLAQLINEKPQVIQEYESGKAIPNQQIIGKLERALGTKLRGKK

SEQ ID NO: 215 - protein, 139 aa, Solanum lycopersicum
  misc_feature (6)..(76): Pfam name: MBF1 Pfam desc: Multiprotein bridging factor 1
  misc_feature (84)..(138): Pfam name: HTH_3 Pfam desc: Helix-turn-helix
  misc_feature: Public GI ID no. 117574665
  misc_feature: Bit score of 290.4 for HMM based on sequences of Figure 3
  misc_feature: Functional Homolog Of Ceres Clone ID no. 158734 at SEQ ID NO. 165
MSGISQDWEPVVIRKKAPTSAARKNEKAVNAARRSGAEIETVKKSNAGSNRAASSSTSLNTRKLDEDTENLSHEKVPTELKKAIMQARQDKKLTQSQLAQLINEKPQIIQEYESGKAIPNQQIISKLERALGAKLRGKK

SEQ ID NO: 216 - DNA, 423 bp, Solanum lycopersicum
  misc_feature: Ceres Annot ID no. 8457163
  misc_feature: Encodes the peptide sequence at SEQ ID NO. 217
atgagtggaggattatcacaagactgggagccggtggtgatccggaagaaggcaccgaccgccgccgcacgcaaggatgagaaagctgtcaacgctgcccgtcgctccggtgctgagatcgaaactatcagaaaatcaactgctggctcaaacagggctgcctctagtagtacgaccttgaacaccaggaaacttgatgaagatactgagaatctggctcatcaaaaagtaccgactgagctgaagaaagccatcatgcaagctcgacaagataagaagctgactcagtctcaacttgctcagctgataaatgagaagcctcaaatcatccaggagtacgagtcaggaaaggcaattccaaatcaacaaatcatctctaaactggagagagctcttggtgccaaacttagaggaaagaaatga

SEQ ID NO: 217 - protein, 140 aa, Solanum lycopersicum
  misc_feature (7)..(77): Pfam name: MBF1 Pfam desc: Multiprotein bridging factor 1
  misc_feature (85)..(139): Pfam name: HTH_3 Pfam desc: Helix-turn-helix
  misc_feature: Ceres Annot ID no. 8457163
  misc_feature: Bit score of 294.5 for HMM based on sequences of Figure 3
  misc_feature: Functional Homolog Of Ceres Clone ID no. 158734 at SEQ ID NO. 165
MSGGLSQDWEPVVIRKKAPTAAARKDEKAVNAARRSGAEIETIRKSTAGSNRAASSSTTLNTRKLDEDTENLAHQKVPTELKKAIMQARQDKKLTQSQLAQLINEKPQIIQEYESGKAIPNQQIISKLERALGAKLRGKK

SEQ ID NO: 218 - protein, 139 aa, Solanum lycopersicum
  misc_feature (6)..(76): Pfam name: MBF1 Pfam desc: Multiprotein bridging factor 1
  misc_feature (84)..(138): Pfam name: HTH_3 Pfam desc: Helix-turn-helix
  misc_feature: Public GI ID no. 109288140
  misc_feature: Bit score of 290.3 for HMM based on sequences of Figure 3
  misc_feature: Functional Homolog Of Ceres Clone ID no. 158734 at SEQ ID NO. 165
MAGLSQDWEPVVIRKKAPTAAARKDEKAVNAARRAGAEIETVRKATAGSNKAASSSTTLNTRKLDEDTENLSHQKVPTELKKAIMQARQDKKLTQSQLAQLINEKPQIIQEYESGKAIPNQQIISKLERALGAKLRGKK

SEQ ID NO: 219 - protein, 140 aa, Nicotiana tabacum
  misc_feature (7)..(77): Pfam name: MBF1 Pfam desc: Multiprotein bridging factor 1
  misc_feature (85)..(139): Pfam name: HTH_3 Pfam desc: Helix-turn-helix
  misc_feature: Public GI ID no. 20086364
  misc_feature: Bit score of 298.2 for HMM based on sequences of Figure 3
  misc_feature: Functional Homolog Of Ceres Clone ID no. 158734 at SEQ ID NO. 165
MSGGIAQDWEPVVIRKKAPTAAARKDEKAVNAARRSGAEIETIRKSAAGTNKAASSSTTLNTRKLDEDTENLAHQKVPTELKKAIMQARQDKKLTQAQLAQLINEKPQIIQEYESGKAIPNQQIISKLERALGAKLRGKK

SEQ ID NO: 220 - protein, 139 aa, Solanum tuberosum
  misc_feature (6)..(76): Pfam name: MBF1 Pfam desc: Multiprotein bridging factor 1
  misc_feature (84)..(138): Pfam name: HTH_3 Pfam desc: Helix-turn-helix
  misc_feature: Public GI ID no. 8895787
  misc_feature: Bit score of 293.9 for HMM based on sequences of Figure 3
  misc_feature: Functional Homolog Of Ceres Clone ID no. 158734 at SEQ ID NO. 165
MSGISQDWEPVVIRKKAPTSAARKDEKAVNAARRSGAEIETVKKSNAGSNRAASSSTSLNTRKLDEDTENLSHEKVPTELKKAIMQARQDKKLTQSQLAQLINEKPQIIQEYESGKAIPNQQIISKLERALGAKLRGKK

SEQ ID NO: 221 - DNA, 429 bp, Sorghum bicolor
  misc_feature: Ceres Annot ID no. 8709723
  misc_feature: Encodes the peptide sequence at SEQ ID NO. 222
atggccgggatcgggccgatcaggcaggactgggagccggtggtggtgcggaagaaggcacccaccgcagccgccaagaaggatgagaaggccgtcaacgccgcgcgccgcgccggcgccgagatcgagaccatgaagaagtacaacgctggcacgaacaaggcggcgtccagcggcacatccctcaacaccaagcgcctcgacgacgacactgaaaacctcgcccatgagcgagttccaagtgacctgaagaaaaatctcatgcaagcaaggctcgataagaagatgacccaggcacagcttgctcagatgatcaatgagaagccacaggtgatccaggagtatgagtcgggcaaggcaatccccaaccagcagatcattggcaagctcgagagggccctgggaacgaagctgcgtggcaagaaatag

SEQ ID NO: 222 - protein, 142 aa, Sorghum bicolor
  misc_feature (9)..(79): Pfam name: MBF1 Pfam desc: Multiprotein bridging factor 1
  misc_feature (87)..(141): Pfam name: HTH_3 Pfam desc: Helix-turn-helix
  misc_feature: Ceres Annot ID no. 8709723
  misc_feature: Bit score of 297.9 for HMM based on sequences of Figure 3
  misc_feature: Functional Homolog Of Ceres Clone ID no. 158734 at SEQ ID NO. 165
MAGIGPIRQDWEPVVVRKKAPTAAAKKDEKAVNAARRAGAEIETMKKYNAGTNKAASSGTSLNTKRLDDDTENLAHERVPSDLKKNLMQARLDKKMTQAQLAQMINEKPQVIQEYESGKAIPNQQIIGKLERALGTKLRGKK

SEQ ID NO: 223 - DNA, 816 bp, Triticum aestivum
  misc_feature: Ceres Clone ID no. 638938
  misc_feature: Encodes the peptide sequence at SEQ ID NO. 224
gagaaccaccgattgcgactcgagaacctttcgttcatctccaaaaatatcttcctcctctttcctgcgcctccattatcccttgcgtggttttagtctgtgaactcgagagaccgagcgaggaaagttgccgtgtgagacctgagagttaggagatatggctgggattggtcctatcaggcaggactgggagccgatagtggtgcggaagaaggcgcagaacgccgccgacaagaaggacgaaaaggccgtcaacgctgcccgccgctccggcgccgagatcgacaccaccaagaagtacaacgctggaacgaacaaggctgcatctagcggaacttccctcaacaccaagcggctcgacgacgacaccgagaacctttcccatgagcgtgtttcaagtgacctcaagaaaaaccttatgcaagcaaggctggataagaagatgacccaggcacaacttgctcagatgatcaatgagaagccacaggtgatccaggagtacgagtcgggcaaagcgattccgaacaatcagataattggaaagcttgagagggcacttggagctaagctgcgtagcaagaagtaatgccttgaagtagcccaaaagctcttgtaggctgttgctgttggttgatactgaataactatgccacagaacgactttatgtatcattatattctcgtgctctaaaatgtgtttgtcatatgtcccagtgtaagagctgcattgaacatgcagactgacatgataacctgcgtggtttatgcgtggtgtttgtcactggcttttgctaatacaagtttctattgtgagcc

SEQ ID NO: 224 - protein, 142 aa, Triticum aestivum
  misc_feature (9)..(79): Pfam name: MBF1 Pfam desc: Multiprotein bridging factor 1
  misc_feature (87)..(141): Pfam name: HTH_3 Pfam desc: Helix-turn-helix
  misc_feature: Ceres Clone ID no. 638938
  misc_feature: Bit score of 283.9 for HMM based on sequences of Figure 3
  misc_feature: Functional Homolog Of Ceres Clone ID no. 158734 at SEQ ID NO. 165
MAGIGPIRQDWEPIVVRKKAQNAADKKDEKAVNAARRSGAEIDTTKKYNAGTNKAASSGTSLNTKRLDDDTENLSHERVSSDLKKNLMQARLDKKMTQAQLAQMINEKPQVIQEYESGKAIPNNQIIGKLERALGAKLRSKK

SEQ ID NO: 225 - DNA, 787 bp, Triticum aestivum
  misc_feature: Ceres Clone ID no. 1031619
  misc_feature: Encodes the peptide sequence at SEQ ID NO. 226
cccgatcattcgcaccgaccacatcctcatcgtctccaacctcggcgaaaccctagcctagccccgccgaatcgcgagtccccccgaagccggagcaagccgagatgtcccgcaccggaccgatcgcccaggactgggagccggtggtcgtgcgcaagaagctgcccaacgccgccgccaagaaggacgagaaggccgtcaacgccgcccgccgcgccggcgtcgacatcgacatcgccaagaagcataatgctgggacaaacaaagctgctcatagcaccacatcgctcaatacaaagaggcttgatgatgatacagagaatcttgctcatgagcgtgtgccgtcagacctgaagaagagcattatgcaggctagaacggacaagaagctcacacaggcacagcttgcacagctgatcaatgagaagccacaagtcatccaggagtacgagtcaggcaaggctatcccaaaccaacagatcatcggcaagctggaaagggctcttggcacaaagctgcgaggcaagaagtgaagctgcgtgtgcatctgacaggagtcgaggctttcaagagagcttggctgggcaagtttaccgctaaataaagcttgtctactaaatcatgcgacttaagaaaaccccggagtttggtatttcgctcaggtttgggtgaatgtaattattagcttctgtgaacaactctgtatctgggtttcgtttcgtcagcgtgtcttcgtgaatgtgaactgttctgaatgcctgaacctttatataacttgtctctgttg

SEQ ID NO: 226 - protein, 142 aa, Triticum aestivum
  misc_feature (9)..(79): Pfam name: MBF1 Pfam desc: Multiprotein bridging factor 1
  misc_feature (87)..(141): Pfam name: HTH_3 Pfam desc: Helix-turn-helix
  misc_feature: Ceres Clone ID no. 1031619
  misc_feature: Bit score of 283.0 for HMM based on sequences of Figure 3
  misc_feature: Functional Homolog Of Ceres Clone ID no. 158734 at SEQ ID NO. 165
MSRTGPIAQDWEPVVVRKKLPNAAAKKDEKAVNAARRAGVDIDIAKKHNAGTNKAAHSTTSLNTKRLDDDTENLAHERVPSDLKKSIMQARTDKKLTQAQLAQLINEKPQVIQEYESGKAIPNQQIIGKLERALGTKLRGKK

SEQ ID NO: 227 - DNA, 459 bp, Triticum aestivum
  misc_feature: Ceres Clone ID no. 685323
  misc_feature: Encodes the peptide sequence at SEQ ID NO. 228
  misc_feature (311)..(311): n is a, c, t, g, unknown, or other
acgagaacagagaaagagaaaggcgaggagaagataaaatcaagaggggaaacagggtagaggcagagagaacagaaggagcgatgccgactggtaggatgagcggcaacatcacgcaggactgggagccggtggtcctgcggcgggcgaagcccaaggcggccgacctcaagtccgccaaggcggtgaaccaggcgctgcggacgggcgcgccggtggagacggtgcgcaaggtggcggcgggcacgaacaagaaggcctccgccgcggccgtggcggcgcccgcgaggaagctggacgagatgacgganccggcggggctggagcgcgtgggcggcgacgtgcgggcggccatccagaaggcgcgcgtggccaaagggtggagccaggcggagctggccaagcgcatcagcgagcgggcgcaggtggtgcaggagtacgagagcggcaaggccgtcc

SEQ ID NO: 228 - protein, 125 aa, Triticum aestivum
  misc_feature (12)..(83): Pfam name: MBF1 Pfam desc: Multiprotein bridging factor 1
  misc_feature: Ceres Clone ID no. 685323
  misc_feature: Bit score of 219.9 for HMM based on sequences of Figure 3
  misc_feature: Functional Homolog Of Ceres Clone ID no. 158734 at SEQ ID NO. 165
  misc_feature (76)..(76): Xaa is any aa, unknown, or other
MPTGRMSGNITQDWEPVVLRRAKPKAADLKSAKAVNQALRTGAPVETVRKVAAGTNKKASAAAVAAPARKLDEMTXPAGLERVGGDVRAAIQKARVAKGWSQAELAKRISERAQVVQEYESGKAV

SEQ ID NO: 229 - DNA, 517 bp, Triticum aestivum
  misc_feature: Ceres Clone ID no. 683522
  misc_feature: Encodes the peptide sequence at SEQ ID NO. 230
aaccccgatcattcgcaccgaccaaatcctcatcgtctccaacctcggcgaaaccctagctagccccaccgaatcgcaagcccccccccccgaagccggagcaagccgagatgtctcgcaccggaccgatcgcccaggactgggagccggtggtcgtgcgcaagaagctgcccaacgccgccgccaagaaggacgagaaggccgtcaacgccgcccgccgcgccggcgtcgacatcgacatcgccaagaagcataatgctgggacaaacaaagctgctcatagcaccacatcgctcaatacaaagaggcttgatgatgatacagagaatcttgctcatgagcgtgtgccgtcagacctgaagaagagcattatgcaggctagaacggacaagaagctcacacaggcacagcttgcacagctgatcaatgagaagccacaagtcatccaggagtacgagtcaggcaaggctatcccaaaccaacagatcatcggcaagctggaaagggctcttggcac

SEQ ID NO: 230 - protein, 135 aa, Triticum aestivum
  misc_feature (9)..(79): Pfam name: MBF1 Pfam desc: Multiprotein bridging factor 1
  misc_feature (87)..(135): Pfam name: HTH_3 Pfam desc: Helix-turn-helix
  misc_feature: Ceres Clone ID no. 683522
  misc_feature: Bit score of 252.7 for HMM based on sequences of Figure 3
  misc_feature: Functional Homolog Of Ceres Clone ID no. 158734 at SEQ ID NO. 165
MSRTGPIAQDWEPVVVRKKLPNAAAKKDEKAVNAARRAGVDIDIAKKHNAGTNKAAHSTTSLNTKRLDDDTENLAHERVPSDLKKSIMQARTDKKLTQAQLAQLINEKPQVIQEYESGKAIPNQQIIGKLERALG

SEQ ID NO: 231 - DNA, 713 bp, Zea mays
  misc_feature: Ceres P ID no. 101136883
  misc_feature: Encodes the peptide sequence at SEQ ID NO. 232
  misc_feature (15)..(15): n is a, c, t, g, unknown, or other
  misc_feature (417)..(417): n is a, c, t, g, unknown, or other
ccacgccgtccgggnaaatacaagggaaataagagtacagatatgccaactggtaggctgagcggcaacatcacccaggactgggagccggtggttctgcgccgtacgaagccgaaggcggcggacctcaagtcgtcgaaggcggtgaaccaggcgctgcggtcgggcgcagccgtggagacggtgcgcaagtcagcggcgggcatgaacaagcactccacgacggtggcgcccgcgcgtaagctggacgagacgacggaacccgcggcggtggagcgggtggctgtggaggtgcgcgcggcaatccagaaggcgcgcgtggccaagggatggagccaggcggagctggcgaagcgcatcaacgagcgcgcgcaggtggtgcaggagtacgagagcggcaaggcggcgccggcccangccgtgcttgccaagatggagcgcgctctcgaggtcaagctccgtgggaagggcgtcggcgcgccactggcggccggcgggaagtgatctgatattctgatgtgatggacttgtgcagattgcaacgttgatagcttaacctcttttttgaatcggctggttcggatgggcagtttgtgtttgtaggatcgtaattgggggaatactatatgatgtgaaggacttgttgcgatgtttgattggtaaatggttgtggatgtcgagcattatttgtagcactgtatgcatgcgtatag

SEQ ID NO: 232 - protein, 153 aa, Zea mays
  misc_feature (12)..(80): Pfam name: MBF1 Pfam desc: Multiprotein bridging factor 1
  misc_feature (88)..(142): Pfam name: HTH_3 Pfam desc: Helix-turn-helix
  misc_feature: Ceres P ID no. 101136883
  misc_feature: Bit score of 308.2 for HMM based on sequences of Figure 3
  misc_feature: Functional Homolog Of Ceres Clone ID no. 158734 at SEQ ID NO. 165
  misc_feature (125)..(125): Xaa is any aa, unknown, or other
MPTGRLSGNITQDWEPVVLRRTKPKAADLKSSKAVNQALRSGAAVETVRKSAAGMNKHSTTVAPARKLDETTEPAAVERVAVEVRAAIQKARVAKGWSQAELAKRINERAQVVQEYESGKAAPAXAVLAKMERALEVKLRGKGVGAPLAAGGK

SEQ ID NO: 233 - DNA, 661 bp, Zea mays
  misc_feature: Ceres Clone ID no. 348434
  misc_feature: Encodes the peptide sequence at SEQ ID NO. 234
aagtcctatcaacagcgtgctcgagattacagagatgccaactggtaggctgagcggcaacatcacccaggactgggagccggtggttctgcgccgtacgaagccgaaggcggccgacctcaagtcgtcgaaggcggtgaaccaggcgctgcgatcgggcgcggccgtggagacggtgcgcaagtcagcagcgggcatgaacaagcactccgctgcggtggcgcccgcgcgtaagctggacgagacgacggagcccgctgcggtggagcgggtggctgtggaggtgcgcgcggccattcagaaggcgcgcgtggccaagggatggagccaggcggagctggcgaagcacatcaacgagcgcgcgcaggtggtgcaggagtacgagagcagcaaggcggcgccggcccaggccgtgcttgccaagatggagcgcgctctcgaggtcaagctccgcgggaagggcgtcggcgcgccactggcggccgtcgggaagtgatctgatgtgatggacttgtgcagattgcaacgttgatagcttaacctctttttttgaatcggctggttcggatgtgcagtttgtgtttgtaggatcgtaattgtgggaatattatatgatgtgaaggacttgtttcgaagtttgactggtaaatggttgcgggtg

SEQ ID NO: 234 - protein, 153 aa, Zea mays
  misc_feature (12)..(80): Pfam name: MBF1 Pfam desc: Multiprotein bridging factor 1
  misc_feature (88)..(142): Pfam name: HTH_3 Pfam desc: Helix-turn-helix
  misc_feature: Ceres Clone ID no. 348434
  misc_feature: Bit score of 304.6 for HMM based on sequences of Figure 3
  misc_feature: Functional Homolog Of Ceres Clone ID no. 158734 at SEQ ID NO. 165
MPTGRLSGNITQDWEPVVLRRTKPKAADLKSSKAVNQALRSGAAVETVRKSAAGMNKHSAAVAPARKLDETTEPAAVERVAVEVRAAIQKARVAKGWSQAELAKHINERAQVVQEYESSKAAPAQAVLAKMERALEVKLRGKGVGAPLAAVGK

SEQ ID NO: 235 - DNA, 709 bp, Brassica napus
  misc_feature: Ceres Clone ID no. 1377080
  misc_feature: Encodes the peptide sequence at SEQ ID NO. 236
atattaatcatcccattcccagctatctatctcctagaaaaacaatctgattcttttcgcctaatattagctggagacgaaaccctagattttgtcaagctcgaagaagaagaaatcatggcaggagttggaccgatgacgcaagattgggagccggtggtgatccgaaagagagcccctaactccgccgccaagcgcgacgagaaaaccgtcaacgccgctcgtcgatccggcgccgatatcgaatccgtcagaaaatacaatgctggaaccaacaaggcagcctcaagtggcacatctctcaacactaaaaggcttgatgacgacactgagaacctcgctcatgagcgtgtgcctactgagcttaagaaagccattatgcaagctcgaactgacaagaagcttacccagtcccaacttgctcaaatcatcaatgagaagccacaagtgatccaagagtatgagtctggtaaagcgatccccaaccagcagatcctttctaagcttgagagagctcttggagctaaacttcgtggtaagaagtgatcatcatcaattcctgaagatgaacatcacttaattgcagtttcactattcttaatgactctgtggtaacaacaatcagtgctttgatgtaatgtcgtaacttttctaaagaacaatcttttctcatgtaagaaagatagaaccgtttgaatgtttggttgat

SEQ ID NO: 236 - protein, 142 aa, Brassica napus
  misc_feature (9)..(79): Pfam name: MBF1 Pfam desc: Multiprotein bridging factor 1
  misc_feature (87)..(141): Pfam name: HTH_3 Pfam desc: Helix-turn-helix
  misc_feature: Ceres Clone ID no. 1377080
  misc_feature: Bit score of 295.5 for HMM based on sequences of Figure 3
  misc_feature: Functional Homolog Of Ceres Clone ID no. 158734 at SEQ ID NO. 165
MAGVGPMTQDWEPVVIRKRAPNSAAKRDEKTVNAARRSGADIESVRKYNAGTNKAASSGTSLNTKRLDDDTENLAHERVPTELKKAIMQARTDKKLTQSQLAQIINEKPQVIQEYESGKAIPNQQILSKLERALGAKLRGKK

SEQ ID NO: 237 - DNA, 679 bp, Arabidopsis thaliana
  misc_feature: Ceres Clone ID no. 1159254
  misc_feature: Encodes the peptide sequence at SEQ ID NO. 238
aacttgtcacctgcagagaaagaaagaagccctagattttgtcaaaaggcggttgcagaacaaaaaaccatggccggaattggaccgataactcaggattgggagccggtggtgatccgtaagaaacccgctaacgccgctgccaagcgcgacgagaaaactgtcaacgccgctcgtcgatccggcgccgatatcgagaccgtcagaaaattcaatgctggaaccaacaaggcggcatcaagcggcacatctctgaacacaaaaatgcttgatgatgacactgagaaccttactcatgaacgtgtgcctactgagctaaagaaagccattatgcaagccaggacagacaagaagctaacccagtcccaacttgctcaaatcatcaatgagaagccacaagtgattcaagagtatgagtctggcaaagctatacccaaccagcaaatcctttctaagctggagagagcgcttggagctaagcttcgtggaaagaagtgagccaagttctactgatgtagcaagtaacaagaatcaatgctttcgtctaatgccgtaactttgccaagaagaatattttctgattgtaagaaagcaaaaccgtttgaatgtttgtttcgttgatggaatctctatctcataaactcatatcaatataataacttgggtcttttcatcacat

SEQ ID NO: 238 - protein, 142 aa, Arabidopsis thaliana
  misc_feature (9)..(79): Pfam name: MBF1 Pfam desc: Multiprotein bridging factor 1
  misc_feature (87)..(141): Pfam name: HTH_3 Pfam desc: Helix-turn-helix
  misc_feature: Ceres Clone ID no. 1159254
  misc_feature: Bit score of 296.2 for HMM based on sequences of Figure 3
  misc_feature: Functional Homolog Of Ceres Clone ID no. 158734 at SEQ ID NO. 165
MAGIGPITQDWEPVVIRKKPANAAAKRDEKTVNAARRSGADIETVRKFNAGTNKAASSGTSLNTKMLDDDTENLTHERVPTELKKAIMQARTDKKLTQSQLAQIINEKPQVIQEYESGKAIPNQQILSKLERALGAKLRGKK

SEQ ID NO: 239 - DNA, 728 bp, Zea mays
  misc_feature: Ceres Clone ID no. 417073
  misc_feature: Encodes the peptide sequence at SEQ ID NO. 240
  misc_feature (719)..(719): n is a, c, t, g, unknown, or other
gcgttcccttcgttgcgtcttgaaaggggagagagagagaggctgccgtgtagggaccgtagactcagcgactgcgaaggagggataaggggatggccgggatcggaccgatcaggcaggactgggagccggtcgttgtgcggaagaaggcacccaccgccgccgccaagaaggatgagaaggccgtcaacgccgcgcgccgcgccggtgcggagatcgataccatgaagaagtacaacgctggtacgaacaaggcggcatccagcggtacatccctcaacaccaagcgcctcgacgacgacaccgaaaacctcgcccatgagcgagttccaagtgatctgaagaagaatctcatgcaagcaaggctcgataagaagctgacacaggcacaacttgctcagatgataaatgagaagccacaggtgattcaggagtatgaatcaggcaaggcaatccccaaccagcagatcattagcaagctcgagagggccctgggaaccaagttgcgtggcaagaaatagctttcctacgagtttgtgtcccggagcatcataatagggggaagacaaggcaagctgtctgcttatttgtctatgtttggtatctcaagtcctgcggactgtttctgttggcacaagagggaataaatgtgttcacggacctgtaatgcttgctccttgtcatatgaccttgctctaaacatttgtgatgaagctgtncaggtaatg

SEQ ID NO: 240 - protein, 142 aa, Zea mays
  misc_feature (9)..(79): Pfam name: MBF1 Pfam desc: Multiprotein bridging factor 1
  misc_feature (87)..(141): Pfam name: HTH_3 Pfam desc: Helix-turn-helix
  misc_feature: Ceres Clone ID no. 417073
  misc_feature: Bit score of 295.2 for HMM based on sequences of Figure 3
  misc_feature: Functional Homolog Of Ceres Clone ID no. 158734 at SEQ ID NO. 165
MAGIGPIRQDWEPVVVRKKAPTAAAKKDEKAVNAARRAGAEIDTMKKYNAGTNKAASSGTSLNTKRLDDDTENLAHERVPSDLKKNLMQARLDKKLTQAQLAQMINEKPQVIQEYESGKAIPNQQIISKLERALGTKLRGKK

SEQ ID NO: 241 - protein, 144 aa, Vitis vinifera
  misc_feature (11)..(79): Pfam name: MBF1 Pfam desc: Multiprotein bridging factor 1
  misc_feature (87)..(141): Pfam name: HTH_3 Pfam desc: Helix-turn-helix
  misc_feature: Public GI ID no. 147852829
  misc_feature: Bit score of 334.8 for HMM based on sequences of Figure 3
  misc_feature: Functional Homolog Of Ceres Clone ID no. 158734 at SEQ ID NO. 165
  misc_feature (6)..(6): Xaa is any aa, unknown, or other
MPNRFXGALSQDWEPVVLHKSKPKAQELRDPKAVNKAIRSGAPVQTLKKFDGGANKKAAPIMNTRKLDEGTEPAALDRVSVDVRQLIQKARLEKKMSQAELAKLINERPQVVQEYEBGKAVPNQAVLAKMEKVLGVKLRGKISK

SEQ ID NO: 242 - protein, 142 aa, Vitis vinifera
  misc_feature (9)..(79): Pfam name: MBF1 Pfam desc: Multiprotein bridging factor 1
  misc_feature (87)..(141): Pfam name: HTH_3 Pfam desc: Helix-turn-helix
  misc_feature: Public GI ID no. 147865629
  misc_feature: Bit score of 305.7 for HMM based on sequences of Figure 3
  misc_feature: Functional Homolog Of Ceres Clone ID no. 158734 at SEQ ID NO. 165
MAGVGPLTQDWEPVVIRKKPLNAAAKKDEKAVNAARRSGAEIETLRKSHAGTNKAASSSTSLNTRKLDEETENLAHDRVPTELKKSIMQARMDKKLTQSQLAQMINEKPQIIQEYESGKAIPNQQIIVKLERALGVKLRGKK

SEQ ID NO: 243 - protein, 142 aa, Vitis vinifera
  misc_feature (9)..(79): Pfam name: MBF1 Pfam desc: Multiprotein bridging factor 1
  misc_feature (87)..(141): Pfam name: HTH_3 Pfam desc: Helix-turn-helix
  misc_feature: Public GI ID no. 147777777
  misc_feature: Bit score of 306.0 for HMM based on sequences of Figure 3
  misc_feature: Functional Homolog Of Ceres Clone ID no. 158734 at SEQ ID NO. 165
MAGTGPLTQDWEPVVIRKKPLNAAAKKDEKAVNAARRMGAEIETVKKSSAGTNRAASSSTSLNTRKLDEETENLTHERVPTELKKSIMQARLDKKLTQAQLAQMINEKPQVIQEYESGKAIPNQQIITKLERALGVKLRGKK

SEQ ID NO: 244 - DNA, 596 bp, Parthenium argentatum
  misc_feature: Ceres Clone ID no. 1607224
  misc_feature: Encodes the peptide sequence at SEQ ID NO. 245
acatcatctcatctcatctcatctcatctcatcaacatcaaacatacatcaatagcataccgtcactaacaacctccttccaaaaccttcatcatatattcatataactacctattcatataaactatctatttataataacctgacaatgccaacaagaccagcaggaccagtatctcaagactgggagccagtagtcctccacaaatccaaaccaaaatcacacgtcctccatgacaccaaatcaataaaccaagccatccgctcaggcgctcaagtccaaacagtaaaaaaacacgacggaggaacgaacaaaaagtctcccgctactgttatttacgccaggaagctcgacgaggcagaacagcctgcaacaattgaacgagtgggaacagaggtgaggcagttgatacagaaggcaaggattgagaagaagatgagtcaagcagagttagctaagcagattaatgaacggactcaggttgttcaggagtatgagaacgggaaggcggttccgaaccaggtggtgttggggaagatggagagggkttttgggtgtgaagcttagagggaagatacataagtgatgatgtttt

SEQ ID NO: 245 - protein, 139 aa, Parthenium argentatum
  misc_feature (11)..(80): Pfam name: MBF1 Pfam desc: Multiprotein bridging factor 1
  misc_feature (88)..(139): Pfam name: HTH_3 Pfam desc: Helix-turn-helix
  misc_feature: Ceres Clone ID no. 1607224
  misc_feature: Bit score of 260.6 for HMM based on sequences of Figure 3
  misc_feature: Functional Homolog Of Ceres Clone ID no. 158734 at SEQ ID NO. 165
  misc_feature (134)..(134): Xaa is any aa, unknown, or other
MPTRPAGPVSQDWEPVVLHKSKPKSHVLHDTKSINQAIRSGAQVQTVKKHDGGTNKKSPATVIYARKLDEAEQPATIERVGTEVRQLIQKARIEKKMSQAELAKQINERTQVVQEYENGKAVPNQVVLGKMERXFGCEA

SEQ ID NO: 246 - DNA, 654 bp, Parthenium argentatum
  misc_feature: Ceres Clone ID no. 1609842
  misc_feature: Encodes the peptide sequence at SEQ ID NO. 247
atccatccacttaactccttcctgttcctaatcaccaaaaatgtcaggttttgcacaggactgggagccggtggtcatccgtaagaaagctccgacctccgccgctcgtaaggacgagaaagccgtcaacgccgcccgccgcgccggtgccgagatcgagaccgttaaaaaagctgctgcgggttcaaacaaggctgcctctagcagtacttctctgaacactagaaagcttgatgaagagactgaaaatctctcccatgataaggtaccaactgaattgaagaaagctatcatccagggtcgcaccgagaagaagcttactcaagctcaacttgctcagctgattaatgagaagccccagatcatacaggagtatgaatctggaaaggctataccaaatcaacagataataaccaaactggaaagggctcttggtgtgaaacttaggggtaagaaatagaacagtagcagctggccgctctgtggaggtcccgttctactaaaaatgaaaaaaataaaggagttggggtgcacaaaaccttctgtttctatttgaccacttcttttctggagatggattctgttattgtggattttatgtttgggtgttgacaagtcttgagatgctctgatgtgtttatcataaatgccaca

SEQ ID NO: 247 - protein, 139 aa, Parthenium argentatum
  misc_feature (6)..(76): Pfam name: MBF1 Pfam desc: Multiprotein bridging factor 1
  misc_feature (84)..(138): Pfam name: HTH_3 Pfam desc: Helix-turn-helix
  misc_feature: Ceres Clone ID no. 1609842
  misc_feature: Bit score of 293.6 for HMM based on sequences of Figure 3
  misc_feature: Functional Homolog Of Ceres Clone ID no. 158734 at SEQ ID NO. 165
MSGFAQDWEPVVIRKKAPTSAARKDEKAVNAARRAGAEIETVKKAAAGSNKAASSSTSLNTRKLDEETENLSHDKVPTELKKAIIQGRTEKKLTQAQLAQLINEKPQIIQEYESGKAIPNQQIITKLERALGVKLRGKK

SEQ ID NO: 248 - DNA, 703 bp, Panicum virgatum
  misc_feature: Ceres Clone ID no. 2030861
  misc_feature: Encodes the peptide sequence at SEQ ID NO. 249
aacctccgtgttcgagatcgtgagcgcaagagacagaggagggagggaagcagcgatgccgacgggtaggctgagcggcaacatcacccaggactgggagccggtggtgctgcggcggacgaagccgaaggcggcggacctcaagtcggcgaaggcggtgaaccaggcgctgcgctcgggcgcggccgtggagacggtgcggaagtcggcggcgggcacgaacaagcacgccgcggcgccggcggcgcccgcgcggaagctggacgagacgacggagcccgcggcggtggagcgggtggccgcggaggtgcgcgcggcgatccagcgggcgcgcgtggccaaggggtggagccaggcggagctggcgaagcgcatcagcgagcgcgcgcaggtggtgcaggagtacgagagcggcagggcggcgcccgcgcaggccgtgctcgccaagatggagcgcgcgctcgaggtcaagctccgcggcaggggcgtcggcgcgcccctggcggccggcggcggcaagtgatgcggtggccctgtgcagaccggaacgtcgatagcttaacttatttcggcccgtggaggaggatgcgaatcggcggtgaatgatgtgtagtttgtttgtgttgatctgatcggcttggaagatttggagaatgtaaatcagtagtgacgcattcgcaagtgatttctagaaatctattgg

SEQ ID NO: 249 - protein, 155 aa, Panicum virgatum
  misc_feature (12)..(81): Pfam name: MBF1 Pfam desc: Multiprotein bridging factor 1
  misc_feature (89)..(143): Pfam name: HTH_3 Pfam desc: Helix-turn-helix
  misc_feature: Ceres Clone ID no. 2030861
  misc_feature: Bit score of 310.9 for HMM based on sequences of Figure 3
  misc_feature: Functional Homolog Of Ceres Clone ID no. 158734 at SEQ ID NO. 165
MPTGRLSGNITQDWEPVVLRRTKPKAADLKSAKAVNQALRSGAAVETVRKSAAGTNKHAAAPAAPARKLDETTEPAAVERVAAEVRAAIQRARVAKGWSQAELAKRISERAQVVQEYESGRAAPAQAVLAKMERALEVKLRGRGVGAPLAAGGGK

SEQ ID NO: 250 - DNA, 711 bp, Panicum virgatum
  misc_feature: Ceres Clone ID no. 1875246
  misc_feature: Encodes the peptide sequence at SEQ ID NO. 251
atcctccgcgttcgagatcgtgagcgctagagagagacagaggaagagagaggagggagcgaagcaaccatgccgacgggtaggctgagcggcaacatcacccaggactgggagccggtggtgctgcggcggacgaagccgaaggcggcggacctcaagtcggcgaaggcggtgaaccaggcgctgcgctcgggcgcggccgtggagacggtgcggaaggcggcggcgggcacgaacaggcacgccgcggcgccggcggcgcccgcgcggaagctggacgagacgacggagcccgcggcggtggagcgggtggccgcggaggtgcgcgcggcgatccagagggcgcgcgcggccaaggggtggagccaggcggagctggccaagcgcatcagcgagcgcgcgcaggtggtgcaggagtacgagagcggcagggcggcgcccgcgcaggccgtgctcgccaagatgtagcgcgcactcgaggtcaagctccggcggcggcaagtgatcgatgcggtggccctgtgcagaccggaacgggtcgatggattaacctctttcggctcgtggagggtgcgaatcggcggcgaatcggatgtgtagtttgttcgtgttgtgatcggcttggaagacttgggggggatgcaatcagtagtaacgcgtgcgctagtgatttccagaaattttcttgtgtttgtggtgatcgcttggaag

SEQ ID NO: 251 - protein, 132 aa, Panicum virgatum
  misc_feature (12)..(81): Pfam name: MBF1 Pfam desc: Multiprotein bridging factor 1
  misc_feature: Ceres Clone ID no. 1875246
  misc_feature: Bit score of 253.7 for HMM based on sequences of Figure 3
  misc_feature: Functional Homolog Of Ceres Clone ID no. 158734 at SEQ ID NO. 165
MPTGRLSGNITQDWEPVVLRRTKPKAADLKSAKAVNQALRSGAAVETVRKAAAGTNRHAAAPAAPARKLDETTEPAAVERVAAEVRAAIQRARAAKGWSQAELAKRISERAQVVQEYESGRAAPAQAVLAKM

SEQ ID NO: 252 - DNA, 766 bp, Panicum virgatum
  misc_feature: Ceres Clone ID no. 1764141
  misc_feature: Encodes the peptide sequence at SEQ ID NO. 253
acttcgcgtgctcttacgtttccgtgttgagagagagacagagaggacacgcgagaggctgccgtgtgggggccggagagtcagcgacagcgagggggagagaaggcgatggcggggatcgggccgatcaggcaggactgggagccggtggtggtgcggaagaaggcgcccaccgccgccgccaagaaggatgagaaggccgtcaacgccgcgcgccgctccggcgccgagatcgagaccatgaagaagtacaacgctgggacgaacaaggccacgtccagcggcacatcgctcaacaccaagcgactcgatgacgacactgagaatctagcccatgagcgtgtcccaagtgacctgaagaaaaacctcatgcaagcaaggctggataagaagatgacccaggcacagcttgctcagatgatcaatgagaagccacaggtgatccaggagtatgagtcgggcaaggcgatccctaaccagcagattattagcaagcttgagagggcactgggaacaaagctgcgcgggaagaaataactttaaaacttgtgccccggagcagcatgaagctgaagaagacaaggcagtctgtctgcttgttatctatgcttggtttttaatgtcatgcagactgtttctgtgtttagtacatgagtgaataacagtgtcgtggtggaccttgtaatgccttgctgcttttatgtgtcatatgactcctggtctgtgggctcctgcggatatgcttgtaggaatgtttttctctctc

SEQ ID NO: 253 - protein, 142 aa, Panicum virgatum
  misc_feature (9)..(79): Pfam name: MBF1 Pfam desc: Multiprotein bridging factor 1
  misc_feature (87)..(141): Pfam name: HTH_3 Pfam desc: Helix-turn-helix
  misc_feature: Ceres Clone ID no. 1764141
  misc_feature: Bit score of 297.1 for HMM based on sequences of Figure 3
  misc_feature: Functional Homolog Of Ceres Clone ID no. 158734 at SEQ ID NO. 165
MAGIGPIRQDWEPVVVRKKAPTAAAKKDEKAVNAARRSGAEIETMKKYNAGTNKATSSGTSLNTKRLDDDTENLAHERVPSDLKKNLMQARLDKKMTQAQLAQMINEKPQVIQEYESGKAIPNQQIISKLERALGTKLRGKK

SEQ ID NO: 254 - protein, 142 aa, Oryza sativa subsp. japonica
  misc_feature (9)..(79): Pfam name: MBF1 Pfam desc: Multiprotein bridging factor 1
  misc_feature (87)..(141): Pfam name: HTH_3 Pfam desc: Helix-turn-helix
  misc_feature: Public GI ID no. 115476102
  misc_feature: Bit score of 297.0 for HMM based on sequences of Figure 3
  misc_feature: Functional Homolog Of Ceres Clone ID no. 158734 at SEQ ID NO. 165
MAGIGPIRQDWEPVVVRKKAPTAAAKKDEKAVNAARRSGAEIETMKKYNAGTNKAASSGTSLNTKRLDDDTESLAHERVSSDLKKNLMQARLDKKMTQAQLAQMINEKPQVIQEYESGKAIPNQQIIGKLERALGTKLRGKK

SEQ ID NO: 255 - protein, 145 aa, Retama raetam
  misc_feature (11)..(80): Pfam name: MBF1 Pfam desc: Multiprotein bridging factor 1
  misc_feature (88)..(142): Pfam name: HTH_3 Pfam desc: Helix-turn-helix
  misc_feature: Public GI ID no. 19225065
  misc_feature: Bit score of 312.5 for HMM based on sequences of Figure 3
  misc_feature: Functional Homolog Of Ceres Clone ID no. 158734 at SEQ ID NO. 165
MPTRATGTITQDWETVVLHKSKPKAQDLRNPKAISQALRAGAEVQTIKKFDAGSNEKTAGPVVYARKLDEAAEPAALERVAGEVRHAIQKARLEKKMSQAEVAKQINERPQVVQEYENGKAVPNQAVLAKMERVLGVKLRGKIGK

SEQ ID NO: 256 - protein, 150 aa, Parthenium argentatum
  misc_feature (11)..(80): Pfam name: MBF1 Pfam desc: Multiprotein bridging factor 1
  misc_feature (88)..(143): Pfam name: HTH_3 Pfam desc: Helix-turn-helix
  misc_feature: Bit score of 274.9 for HMM based on sequences of Figure 3
  misc_feature: Functional Homolog Of Ceres Clone ID no. 158734 at SEQ ID NO. 165
MPTRPAGPVSQDWEPVVLHKSKPKSHVLHDTKSINQAIRSGAQVQTVKKHDGGTNKKSPATVIYARKLDEAEQPATIERVGTEVRQLIQKARIEKKMSQAELAKQINERTQVVQEYENGKAVPNQVVLGKMERVFGGVKALEGRYISDDV

SEQ ID NO: 257 - protein, 148 aa, Arabidopsis thaliana
  misc_feature (11)..(83): Pfam name: MBF1 Pfam desc: Multiprotein bridging factor 1
  misc_feature (91)..(145): Pfam name: HTH_3 Pfam desc: Helix-turn-helix
  misc_feature: Bit score of 324.2 for HMM based on sequences of Figure 3
  misc_feature: Functional Homolog Of Ceres Clone ID no. 158734 at SEQ ID NO. 165
MPSRYPGAVTQDWEPVVLHKSKQKSQDLRDPKAVNAALRNGVAVQTVKKFDAGSNKKGKSTAVPVINTKKLEEETEPAAMDRVKAEVRLMIQKARLEKKMLQADLAKQINERTQVVQEYENGKAVPNQAVLAKMEKVLGVKLRGKIGK

SEQ ID NO: 258 - protein, 144 aa, Arabidopsis thaliana
  misc_feature (11)..(83): Pfam name: MBF1 Pfam desc: Multiprotein bridging factor 1
  misc_feature (91)..(142): Pfam name: HTH_3 Pfam desc: Helix-turn-helix
  misc_feature: Bit score of 302.9 for HMM based on sequences of Figure 3
  misc_feature: Functional Homolog Of Ceres Clone ID no. 158734 at SEQ ID NO. 165
  misc_feature (16)..(16): Xaa is any aa, unknown, or other
  misc_feature (80)..(80): Xaa is any aa, unknown, or other
MPSRYPEAVTQDWEPXVLHKSKQKSQDLRDPKAVNAALRNGVAVQTVKKFDAGSNKKGKSTAVPVINTKKLEEETEPAAXDRVKAEVRLMIQKARLEKKMSQADLAKQINERTQVVQEYENGKAVPNQAVLAKMEKVLGVKLRG

SEQ ID NO: 259 - protein, 145 aa, Brassica napus
  misc_feature (11)..(83): Pfam name: MBF1 Pfam desc: Multiprotein bridging factor 1
  misc_feature (91)..(145): Pfam name: HTH_3 Pfam desc: Helix-turn-helix
  misc_feature: Bit score of 320.0 for HMM based on sequences of Figure 3
  misc_feature: Functional Homolog Of Ceres Clone ID no. 158734 at SEQ ID NO. 165
MPSRYPGAVTQDWEPVVLHKTKPKSQDLRDPKAVNAALRSGLAVQTVKKFDAGSNKKGKSTAVPVINTKKLEEETEPSAMDRVKAEVRLAIQKARLEKKMSQADLAKQINERTQVVQEYENGKAVPNQAVLAKMEKVLGVKLRGK

SEQ ID NO: 260 - protein, 145 aa, Raphanus sativus
  misc_feature (11)..(83): Pfam name: MBF1 Pfam desc: Multiprotein bridging factor 1
  misc_feature (91)..(145): Pfam name: HTH_3 Pfam desc: Helix-turn-helix
  misc_feature: Bit score of 317.1 for HMM based on sequences of Figure 3
  misc_feature: Functional Homolog Of Ceres Clone ID no. 158734 at SEQ ID NO. 165
MPSRYPGAVTQDWEPVVLHKTKPKSQDLRDPKAVNAALRSGLAVQTVKKFDAGSNKKGKSTAVPVINTKKLEEETEPSAMDRVKAEVRLAIQKARLEKNMSQADLAKQINERTQVVQEYENGKAVPNQAVLAKMEKVLGVKLRGK

SEQ ID NO: 261 - protein, 145 aa, Raphanus sativus
  misc_feature (11)..(83): Pfam name: MBF1 Pfam desc: Multiprotein bridging factor 1
  misc_feature (91)..(145): Pfam name: HTH_3 Pfam desc: Helix-turn-helix
  misc_feature: Bit score of 316.7 for HMM based on sequences of Figure 3
  misc_feature: Functional Homolog Of Ceres Clone ID no. 158734 at SEQ ID NO. 165
MPSRYPGAVMQDWEPVVLHKTKPKSQDLRDPKAVNAALRSGLAVQTVKKFDAGSNKKGKSTAVPVINTKKLEEETEPAAMDHVKAEVRLAIQKARLEKKMSQADLAKQINERTQVVQEYENGKAVPNQAVLAKMEKVLGVKLRGK

SEQ ID NO: 262 - protein, 145 aa, Brassica napus
  misc_feature (11)..(83): Pfam name: MBF1 Pfam desc: Multiprotein bridging factor 1
  misc_feature (91)..(145): Pfam name: HTH_3 Pfam desc: Helix-turn-helix
  misc_feature: Bit score of 307.9 for HMM based on sequences of Figure 3
  misc_feature: Functional Homolog Of Ceres Clone ID no. 158734 at SEQ ID NO. 165
MPSRYPGAVTQDWEPVVLHKTKPKSQDLRNPKAVNAALRSGLAVQTVKKFDAGSDKKGKSTAVPVINTKKLEEETEPSAMDRVKAEVRLAIQRARLEKKMSQADLAKQINERTQVVQEYENGKAVPNQAVLAKIEKVLGVKLRGK

SEQ ID NO: 263 - protein, 143 aa, Brassica napus
  misc_feature (11)..(83): Pfam name: MBF1 Pfam desc: Multiprotein bridging factor 1
  misc_feature (91)..(142): Pfam name: HTH_3 Pfam desc: Helix-turn-helix
  misc_feature: Bit score of 304.0 for HMM based on sequences of Figure 3
  misc_feature: Functional Homolog Of Ceres Clone ID no. 158734 at SEQ ID NO. 165
MPSRYPGAVTQDWEPVVLHKTKPKSQDLRNPKAVNAALRSGLAVQTVKKFDAGSNKKGKSTAVPVINTKKLEEETEPSAMDRVKAEVRLAIQKARLEKKMSQADLAKQINERTQVVQEYENGKAVPNQAVLAKIEKVLGVKLR

SEQ ID NO: 264 - protein, 150 aa, Raphanus sativus
  misc_feature (11)..(83): Pfam name: MBF1 Pfam desc: Multiprotein bridging factor 1
  misc_feature (91)..(145): Pfam name: HTH_3 Pfam desc: Helix-turn-helix
  misc_feature: Bit score of 303.8 for HMM based on sequences of Figure 3
  misc_feature: Functional Homolog Of Ceres Clone ID no. 158734 at SEQ ID NO. 165
MPSRYPGAVTQDWEPVVLHKTKPKSQDLRDPKAVNAALRSGLAVQTVKKFDAGSNKKGKSTAVPVINTKKLEEETEPSAMDRVKAEVRLAIQKARLEKKMSQADLAKQINERTQVVQEYENGKAVPNQAVLAKMVKLSFVQVLGVKLRGK

SEQ ID NO: 265 - protein, 138 aa, Brassica napus
  misc_feature (11)..(83): Pfam name: MBF1 Pfam desc: Multiprotein bridging factor 1
  misc_feature (91)..(138): Pfam name: HTH_3 Pfam desc: Helix-turn-helix
  misc_feature: Bit score of 285.3 for HMM based on sequences of Figure 3
  misc_feature: Functional Homolog Of Ceres Clone ID no. 158734 at SEQ ID NO. 165
MPSRYPGAVTQDWEPVVLHKTKPKSQDLRDPKAVNAALRSGLAVQTVKKFDAGSNKKGKSTAVPVINTKKLEEETEPSAMDRVKAEVRLAIQKARLEKKMSQADLAKQINERTQVVQEYENGKAVPNQAVLAKMEKVL

SEQ ID NO: 266 - protein, 130 aa, Arabidopsis thaliana
  misc_feature (11)..(83): Pfam name: MBF1 Pfam desc: Multiprotein bridging factor 1
  misc_feature: Bit score of 254.1 for HMM based on sequences of Figure 3
  misc_feature: Functional Homolog Of Ceres Clone ID no. 158734 at SEQ ID NO. 165
MPSRYPGAVTQDWEPVVLHKSKQKSQDLRDPKAVNAALRNGVAVQTVKKFDAGSNKKGKSTAVPVINTKKLEEETEPAAMDRVKAEVRLMIQKARLEKKMSQADLAKQINERTQVVQEYENGKAVPNQAV

SEQ ID NO: 267 - protein, 125 aa, Brassica napus
  misc_feature (11)..(83): Pfam name: MBF1 Pfam desc: Multiprotein bridging factor 1
  misc_feature: Bit score of 229.5 for HMM based on sequences of Figure 3
  misc_feature: Functional Homolog Of Ceres Clone ID no. 158734 at SEQ ID NO. 165
MPSRYPGAVTQDWEPVVLHKTKPKSQDLRNPKAVNAALRSGLAVQTVKKFDAGSNKKGKSTAVPVINTKKLEEETEPSGMDRVKAEVRLAIQKARLEKKMSQADLAKQINERTQVVQEYENGKAV

SEQ ID NO: 268 - protein, 145 aa, Cucumis melo
  misc_feature (11)..(80): Pfam name: MBF1 Pfam desc: Multiprotein bridging factor 1
  misc_feature (88)..(142): Pfam name: HTH_3 Pfam desc: Helix-turn-helix
  misc_feature: Bit score of 331.6 for HMM based on sequences of Figure 3
  misc_feature: Functional Homolog Of Ceres Clone ID no. 158734 at SEQ ID NO. 165
MPSRFPGALSQDWEPVVLHKAKPKAQALRDPKAVNQAIRSGAPVQTVKKFDAGLNKKVAAAPVNARKLDEGTEPAALDRVGVEVRQAIQKARVEKKMSQAELAKQINERTQVVQEYENGKAVPNQAVLAKMEKVLGVKLRGRSGK

SEQ ID NO: 269 - protein, 145 aa, Lotus japonicus
  misc_feature (11)..(80): Pfam name: MBF1 Pfam desc: Multiprotein bridging factor 1
  misc_feature (88)..(142): Pfam name: HTH_3 Pfam desc: Helix-turn-helix
  misc_feature: Bit score of 329.4 for HMM based on sequences of Figure 3
  misc_feature: Functional Homolog Of Ceres Clone ID no. 158734 at SEQ ID NO. 165
MPTRSTGAISQDWEPVVLHKSKPKAQDLRNPKAVNQALRTGAEVQTVKKSDAGSNRKTAGPVVNARKLDEAAEPAALGRVAGEVRHAIQKARLEKKMSQAELAKQINERPQVVQEYENGKAVPNQAVLAKMERVLGVKLRGKIGK

SEQ ID NO: 270 - protein, 144 aa, Vitis vinifera
  misc_feature (11)..(79): Pfam name: MBF1 Pfam desc: Multiprotein bridging factor 1
  misc_feature (87)..(141): Pfam name: HTH_3 Pfam desc: Helix-turn-helix
  misc_feature: Bit score of 333.5 for HMM based on sequences of Figure 3
  misc_feature: Functional Homolog Of Ceres Clone ID no. 158734 at SEQ ID NO. 165
MPNRFLGALSQDWEPVVLHKSKPKAQELRDPKAVNKAIRSGAPVQTLKKFDGGANKKAAPIMNTRKLDEGTEPAALDRVSVDVRQLIQKARLEKKMSQAELAKLINERPQVVQEYEDGKAVPNQAVLAKMEKVLGVKLRGKISK

SEQ ID NO: 271 - protein, 144 aa, Amborella trichopoda
  misc_feature (11)..(81): Pfam name: MBF1 Pfam desc: Multiprotein bridging factor 1
  misc_feature (89)..(143): Pfam name: HTH_3 Pfam desc: Helix-turn-helix
  misc_feature: Bit score of 319.6 for HMM based on sequences of Figure 3
  misc_feature: Functional Homolog Of Ceres Clone ID no. 158734 at SEQ ID NO. 165
MPNRHPGMITQDWEPVTIHKTKQKASELKDPKAVNAAMRAGAQVQSVKKFDAGSNKKGTNALPVNTRKLDEETEPAALERVKVEVRAQIQKARMDKKMSQAELAKLINERPQVVQEYESGKAIPNQMVLAKMERVLGVKLRGKI

SEQ ID NO: 272 - protein, 144 aa, Vitis vinifera
  misc_feature (11)..(79): Pfam name: MBF1 Pfam desc: Multiprotein bridging factor 1
  misc_feature (87)..(141): Pfam name: HTH_3 Pfam desc: Helix-turn-helix
  misc_feature: Bit score of 333.2 for HMM based on sequences of Figure 3
  misc_feature: Functional Homolog Of Ceres Clone ID no. 158734 at SEQ ID NO. 165
MPNRFLGALSQDWEPVVLHKSKPKAQELRDPKVVNKAIRSGAPVQTLKKFDGGANKKAAPIMNTRKLDEGTEPAALDRVSVDVRQLIQKARLEKKMSQAELAKLINERPQVVQEYEDGKAVPNQAVLAKMEKVLGVKLRGKISK

SEQ ID NO: 273 - protein, 144 aa, Vitis vinifera
  misc_feature (11)..(79): Pfam name: MBF1 Pfam desc: Multiprotein bridging factor 1
  misc_feature (87)..(141): Pfam name: HTH_3 Pfam desc: Helix-turn-helix
  misc_feature: Bit score of 331.9 for HMM based on sequences of Figure 3
  misc_feature: Functional Homolog Of Ceres Clone ID no. 158734 at SEQ ID NO. 165
MPIRFLGALSQDWEPVVLHKSKPKAQELRDPKVVNKAIRSGAPVQTLKKFDGGANKKAAPIMNTRKLDEGTEPAALDRVSVDVRQLIQKARLEKKMSQAELAKLINERPQVVQEYEDGKAVPNQAVLAKMEKVLGVKLRGKISK

SEQ ID NO: 274 - protein, 145 aa, Cichorium intybus
  misc_feature (11)..(80): Pfam name: MBF1 Pfam desc: Multiprotein bridging factor 1
  misc_feature (88)..(142): Pfam name: HTH_3 Pfam desc: Helix-turn-helix
  misc_feature: Bit score of 329.7 for HMM based on sequences of Figure 3
  misc_feature: Functional Homolog Of Ceres Clone ID no. 158734 at SEQ ID NO. 165
MPTRTTGAMSQDWEPVVLHKSRPKAQALRDPKAVNQALRTGAQVQTVKKFDGGSNKKAPATAINARKLDEAAEPAALDRVAPEVRQLIQKARIDKKLSQADLAKQINERPQVVQEYENGKAVPNQAVLAKMERVLGVKLRGKIHK

SEQ ID NO: 275 - protein, 145 aa, Cichorium intybus
  misc_feature (11)..(80): Pfam name: MBF1 Pfam desc: Multiprotein bridging factor 1
  misc_feature (88)..(142): Pfam name: HTH_3 Pfam desc: Helix-turn-helix
  misc_feature: Bit score of 328.9 for HMM based on sequences of Figure 3
  misc_feature: Functional Homolog Of Ceres Clone ID no. 158734 at SEQ ID NO. 165
MPTRTTGAMSQDWEPVVLHKSRPKAQALRDPKAVNQALRTGAQVQTVKKFDGGSNKKAPATAINARKLDEAAEPAALDRVAPEVRQLIQKARTDKKLSQADLAKQINERPQVVQEYENGKAVPNQAVLAKMERVLGVKLRGKIHK

SEQ ID NO: 276 - protein, 144 aa, Malus x
  misc_feature (11)..(79): Pfam name: MBF1 Pfam desc: Multiprotein bridging factor 1
  misc_feature (87)..(141): Pfam name: HTH_3 Pfam desc: Helix-turn-helix
  misc_feature: Bit score of 317.4 for HMM based on sequences of Figure 3
  misc_feature: Functional Homolog Of Ceres Clone ID no. 158734 at SEQ ID NO. 165
MPSRNPGVISQDWEPVVLQKKPNKASALRDPKAVNQAMRSGAPVQTIKKFDGGSNKKAGPVVSVKKLEEAAEPAALERVSTEVRQAIQKARLEKKMSQAELAKRINERPQVVQEYENGKAVPNQAVLAKMERVLGVKLRGKVGK

SEQ ID NO: 277 - protein, 145 aa, Lactuca perennis
  misc_feature (11)..(80): Pfam name: MBF1 Pfam desc: Multiprotein bridging factor 1
  misc_feature (88)..(142): Pfam name: HTH_3 Pfam desc: Helix-turn-helix
  misc_feature: Bit score of 329.2 for HMM based on sequences of Figure 3
  misc_feature: Functional Homolog Of Ceres Clone ID no. 158734 at SEQ ID NO. 165
MPTRTTGAMSQDWEPVVLHKSRPKAQALRDPKAVNQALRSGAQVQTVKKFDGGTNKKAPATAVYARKLDEAAEPAALDRVATEVRQLIQKARIDKKLSQADLAKQINERPQVVQEYENGKAVPNQAVLAKMERVLGVKLRGKIHK

SEQ ID NO: 278 - protein, 144 aa, Manihot esculenta
  misc_feature (11)..(79): Pfam name: MBF1 Pfam desc: Multiprotein bridging factor 1
  misc_feature (87)..(141): Pfam name: HTH_3 Pfam desc: Helix-turn-helix
  misc_feature: Bit score of 316.1 for HMM based on sequences of Figure 3
  misc_feature: Functional Homolog Of Ceres Clone ID no. 158734 at SEQ ID NO. 165
MPSRSSGVISQDWEPVVLRKSKPKAQDLRDRKAVNQAFRSGVPVQTIKKFDACSNKKAAPVVNARKLEEETEPAALEKVSAEVRQAIQKARLEKKMSQSELAKLINEQPKVVQEYENGKAVHNQAVLAKMEKVLGVKLRGKIGR

SEQ ID NO: 279 - protein, 145 aa, Lactuca saligna
  misc_feature (11)..(80): Pfam name: MBF1 Pfam desc: Multiprotein bridging factor 1
  misc_feature (88)..(142): Pfam name: HTH_3 Pfam desc: Helix-turn-helix
  misc_feature: Bit score of 322.9 for HMM based on sequences of Figure 3
  misc_feature: Functional Homolog Of Ceres Clone ID no. 158734 at SEQ ID NO. 165
MPTRTTGAMSQDWEPVVLHKSRPKAQVLRDPKAVNQALRAGAQVQTVKKFDGGTNKKAPATAVYARKLDEAAEPAALDRVAPEVRQVIQKARIDKKLSQADLAKQINERPQVVQEYENGKAVPNQAVLAKMERVLGVKLRGKIHK

SEQ ID NO: 280 - protein, 143 aa, Malus x
  misc_feature (11)..(78): Pfam name: MBF1 Pfam desc: Multiprotein bridging factor 1
  misc_feature (86)..(140): Pfam name: HTH_3 Pfam desc: Helix-turn-helix
  misc_feature: Bit score of 306.1 for HMM based on sequences of Figure 3
  misc_feature: Functional Homolog Of Ceres Clone ID no. 158734 at SEQ ID NO. 165
MPSRNSGVIVQDWEPVVLQKKPKSSALRDPKAVNQAIRSGAPVQSIKKFDAGSNKKTAPVVSVKKLEEAAEPAALDRVSTEVRLAIQKARLEKKMSQAELAKRINERPQVVQEYENGKAVPNQAVLAKMERVLEVKLRGKVGK

SEQ ID NO: 281 - protein, 139 aa, Lotus japonicus
  misc_feature (11)..(80): Pfam name: MBF1 Pfam desc: Multiprotein bridging factor 1
  misc_feature (88)..(139): Pfam name: HTH_3 Pfam desc: Helix-turn-helix
  misc_feature: Bit score of 302.8 for HMM based on sequences of Figure 3
  misc_feature: Functional Homolog Of Ceres Clone ID no. 158734 at SEQ ID NO. 165
MPTRSTGAISQDWEPVVLHKSKPKAQDLRNPKAVNQALRTGAEVQTVKKSDAGSNRKTAGPVVNARKLDEAAEPAALGRVAGEVRHAIQKARLEKKMSQAELAKQINERPQVVQEYENGKAVPNQAVLAKMERVLGVKL

SEQ ID NO: 282 - protein, 139 aa, Carica papaya
  misc_feature (11)..(80): Pfam name: MBF1 Pfam desc: Multiprotein bridging factor 1
  misc_feature (88)..(139): Pfam name: HTH_3 Pfam desc: Helix-turn-helix
  misc_feature: Bit score of 292.0 for HMM based on sequences of Figure 3
  misc_feature: Functional Homolog Of Ceres Clone ID no. 158734 at SEQ ID NO. 165
MPNRYPGAMARDWEPVVLHKNKPKAQDLRNPKAVNQALRTGAPVQSIKKFDAGSNKKATAPVVNPRKLDEETEPAALERVAVEVRRAIQKARIEKKMSQAELAKLINERPQVVEEYENGKAVPNQDALAKMERVLGVKL

SEQ ID NO: 283 - protein, 143 aa, Malus x
  misc_feature (11)..(78): Pfam name: MBF1 Pfam desc: Multiprotein bridging factor 1
  misc_feature (86)..(140): Pfam name: HTH_3 Pfam desc: Helix-turn-helix
  misc_feature: Bit score of 302.1 for HMM based on sequences of Figure 3
  misc_feature: Functional Homolog Of Ceres Clone ID no. 158734 at SEQ ID NO. 165
MPSRNSGVMVQDWEPVVLQKKPKSSALRDPKAVNQAIRSGAPVQTIKKFDAGSNKKTAPVVSVKKLEEAAEPAALDRVSTEVRLAIQKARLEKKMSQAELAKRINEWPQVVQEYENGKAVPNQAVLAKMERVLEVKLRGKVGK

SEQ ID NO: 284 - protein, 144 aa, Malus x
  misc_feature (11)..(79): Pfam name: MBF1 Pfam desc: Multiprotein bridging factor 1
  misc_feature (87)..(141): Pfam name: HTH_3 Pfam desc: Helix-turn-helix
  misc_feature: Bit score of 304.4 for HMM based on sequences of Figure 3
  misc_feature: Functional Homolog Of Ceres Clone ID no. 158734 at SEQ ID NO. 165
  misc_feature (124)..(124): Xaa is any aa, unknown, or other
MPIRNPGVISQDWEPVVLQKKPNKASALRDPKAVNQAMRSGAPVQTIKKFDGGSNKKAGPVVSVKKLEEAAEPAALERVSTEVRQATQKARLEKKMSQAELAKRINERPQVVQEYENGKAVPNXAVLAKMERVLGVKLKGKVGK

SEQ ID NO: 285 - protein, 143 aa, Vitis vinifera
  misc_feature (10)..(78): Pfam name: MBF1 Pfam desc: Multiprotein bridging factor 1
  misc_feature (86)..(140): Pfam name: HTH_3 Pfam desc: Helix-turn-helix
  misc_feature: Bit score of 293.8 for HMM based on sequences of Figure 3
  misc_feature: Functional Homolog Of Ceres Clone ID no. 158734 at SEQ ID NO. 165
PNRFPGALSQDWEPVVLHKSKPKAQELRDPKPVNKAIRSGAPVQPLKKFDGGANKKAAPIMNTRKLDEGTEPAALARVSVDVRQLIQKPRLEKKMIQAELVKLINERPQVVQEIENGKAVPTQAVLAKMEKVLGVKLRGKISK

SEQ ID NO: 286 - protein, 137 aa, Lotus japonicus
  misc_feature (11)..(80): Pfam name: MBF1 Pfam desc: Multiprotein bridging factor 1
  misc_feature (88)..(137): Pfam name: HTH_3 Pfam desc: Helix-turn-helix
  misc_feature: Bit score of 294.5 for HMM based on sequences of Figure 3
  misc_feature: Functional Homolog Of Ceres Clone ID no. 158734 at SEQ ID NO. 165
MPTRSTGAISQDWEPVVLHKSKPKAQDLRNPKAVNQALRTGAEVQTVKKSDAGSNRKTAGPVVNARKLDEAAEPAALGRVAGEVRHAIQKARLEKKMSQAELAKQINERPQVVQEYENGKAVPNQAVLAKMERVLGV

SEQ ID NO: 287 - protein, 145 aa, Beta vulgaris
  misc_feature (11)..(80): Pfam name: MBF1 Pfam desc: Multiprotein bridging factor 1
  misc_feature (88)..(142): Pfam name: HTH_3 Pfam desc: Helix-turn-helix
  misc_feature: Bit score of 308.5 for HMM based on sequences of Figure 3
  misc_feature: Functional Homolog Of Ceres Clone ID no. 158734 at SEQ ID NO. 165
MPTRSSGPISQDWEPIVLHKTRPKSQDLRDRKAVNEALRTGKAVETVKKGVAGTNKKVTSTAVNARKLDEETEPAALAKVSSEVRLAIQKARIEKKMSQFELGKLINERTQVVQEYENGKAVPNHMVLAKMERVLGVKLRGKGGK

SEQ ID NO: 288 - protein, 135 aa, Vitis vinifera
  misc_feature (11)..(79): Pfam name: MBF1 Pfam desc: Multiprotein bridging factor 1
  misc_feature (87)..(135): Pfam name: HTH_3 Pfam desc: Helix-turn-helix
  misc_feature: Bit score of 289.9 for HMM based on sequences of Figure 3
  misc_feature: Functional Homolog Of Ceres Clone ID no. 158734 at SEQ ID NO. 165
MPNRFLGALSQDWEPVVLHKSKPKAQELRDPKAVNKAKRSGAPVQTLKKFDGGANKKAAPIMNTRKLDEGTEPAALDRVSVDVRQLIQKARLEKKMSQAELAKLINERPQVVQEYEDGKAVPNQTVLAKMEKVLG

SEQ ID NO: 289 - protein, 144 aa, Nicotiana tabacum
  misc_feature (11)..(81): Pfam name: MBF1 Pfam desc: Multiprotein bridging factor 1
  misc_feature (89)..(143): Pfam name: HTH_3 Pfam desc: Helix-turn-helix
  misc_feature: Bit score of 295.6 for HMM based on sequences of Figure 3
  misc_feature: Functional Homolog Of Ceres Clone ID no. 158734 at SEQ ID NO. 165
MPVRPTGGMKQEWEPVVLHKPKKSQDLRDPKAVNQALRTGAQVQTVKKFDAGLNKKTTAASAVVNVRKLDEAAEPAALEKVPVEVRQAIQKARIEKKMSQAELAKQINERPQVVAEYENGKAVPNQLVLAKMEKILGVKLRGKI

SEQ ID NO: 290 - protein, 145 aa, Taraxacum officinale
  misc_feature (11)..(80): Pfam name: MBF1 Pfam desc: Multiprotein bridging factor 1
  misc_feature (88)..(142): Pfam name: HTH_3 Pfam desc: Helix-turn-helix
  misc_feature: Bit score of 308.8 for HMM based on sequences of Figure 3
  misc_feature: Functional Homolog Of Ceres Clone ID no. 158734 at SEQ ID NO. 165
MPTRTTGAMSQDWESMVLHKSRPKAQALRDPKAVNQALRAGAQVQTVKKFNGGTNKKAPATAVYARKLDDAAEPAALDRVAPEVRQLIQKARIDKKLSQADLAKQINERPQVVREYENGKAVPNQAMLAKMERVLGVKLRGKVHK

SEQ ID NO: 291 - protein, 142 aa, Picea glauca
  misc_feature (11)..(79): Pfam name: MBF1 Pfam desc: Multiprotein bridging factor 1
  misc_feature (87)..(141): Pfam name: HTH_3 Pfam desc: Helix-turn-helix
  misc_feature: Bit score of 312.7 for HMM based on sequences of Figure 3
  misc_feature: Functional Homolog Of Ceres Clone ID no. 158734 at SEQ ID NO. 165
MPSRTNGPITQDWTPVVIHKRPQKASEARDPKAVNAAIRAGAQVQSIKKFEGGSNKKAQPLLNTRKLDEETEPAALQKVPAEIRHAIQKARLDQKLSQAELGKRINERAQVIQEYESGKAIPNQAILSKLEKVLGVKLRGKL

SEQ ID NO: 292 - protein, 137 aa, Taraxacum officinale
  misc_feature (3)..(72): Pfam name: MBF1 Pfam desc: Multiprotein bridging factor 1
  misc_feature (80)..(134): Pfam name: HTH_3 Pfam desc: Helix-turn-helix
  misc_feature: Bit score of 283.2 for HMM based on sequences of Figure 3
  misc_feature: Functional Homolog Of Ceres Clone ID no. 158734 at SEQ ID NO. 165
MSQDWESMVLHKSRPKAQALRDPKAVNQALRAGAQVQTVKKFNGGTNKKAPATAVYARKLDDAAEPAALDRVAPEVRQLIQKARIDKKLSQADLAKQINERPQVVREYENGKAVPNQAMLAKMERVLGVKLRGKVHK

SEQ ID NO: 293 - protein, 142 aa, Picea glauca
  misc_feature (11)..(79): Pfam name: MBF1 Pfam desc: Multiprotein bridging factor 1
  misc_feature (87)..(141): Pfam name: HTH_3 Pfam desc: Helix-turn-helix
  misc_feature: Bit score of 313.4 for HMM based on sequences of Figure 3
  misc_feature: Functional Homolog Of Ceres Clone ID no. 158734 at SEQ ID NO. 165
MPSRTNGPITQDWTPVVIHKRPQKASEARDPKAVNAAIRAGAQVQSIKKFEGGSNKKAQPPLNTRKLDEETEPAALQKVPAEIRHAIQKARLDQKLSQAELGKRINERAQVIQEYESGKAIPNQAILSKLEKVLGVKLRGKL

SEQ ID NO: 294 - protein, 142 aa, Picea sitchensis
  misc_feature (11)..(79): Pfam name: MBF1 Pfam desc: Multiprotein bridging factor 1
  misc_feature (87)..(141): Pfam name: HTH_3 Pfam desc: Helix-turn-helix
  misc_feature: Bit score of 313.1 for HMM based on sequences of Figure 3
  misc_feature: Functional Homolog Of Ceres Clone ID no. 158734 at SEQ ID NO. 165
MPSRTNGPITQDWTPVVIHKRPQKASEARDPKAVNAAIRAGAQVQSIKKFEGGSNKKAQPPLNTRKLDEETEPAALQKVPVEIRHAIQKARLDQKLSQAELGKRINERAQVIQEYESGKAIPNQAILSKLEKVLGVKLRGKL

SEQ ID NO: 295 - protein, 142 aa, Picea glauca
  misc_feature (11)..(79): Pfam name: MBF1 Pfam desc: Multiprotein bridging factor 1
  misc_feature (87)..(141): Pfam name: HTH_3 Pfam desc: Helix-turn-helix
  misc_feature: Bit score of 309.8 for HMM based on sequences of Figure 3
  misc_feature: Functional Homolog Of Ceres Clone ID no. 158734 at SEQ ID NO. 165
MPSRTNGPITQDWTPVVIHKRPQKASEARDPKAVNAAIRAGAQVQSIKKFEGGSNKKAQPPLNTRKLDEETEPAALQKVPAEIRHAIQKARLDQKLSQAELGKRINERAQVIQEYESGKAIPNQAILSKLEKVLSVKLRGKL

SEQ ID NO: 296 - protein, 141 aa, Pinus taeda
  misc_feature (11)..(79): Pfam name: MBF1 Pfam desc: Multiprotein bridging factor 1
  misc_feature (87)..(141): Pfam name: HTH_3 Pfam desc: Helix-turn-helix
  misc_feature: Bit score of 307.2 for HMM based on sequences of Figure 3
  misc_feature: Functional Homolog Of Ceres Clone ID no. 158734 at SEQ ID NO. 165
MPSRTNGPITQDWTPVVIHKRPQKASEARDPKAVNAAIRAGGQVQSIKKFEGGTNKKVQPPVNTRKLDEETEPAALQKVPAEVRHAIQKARLDQKLSQAELGKRINERAQVIQEYESGKAIPNQAILSKLEKVLGVKLRGK

SEQ ID NO: 297 - protein, 146 aa, Nicotiana benthamiana
  misc_feature (11)..(81): Pfam name: MBF1 Pfam desc: Multiprotein bridging factor 1
  misc_feature (89)..(143): Pfam name: HTH_3 Pfam desc: Helix-turn-helix
  misc_feature: Bit score of 292.3 for HMM based on sequences of Figure 3
  misc_feature: Functional Homolog Of Ceres Clone ID no. 158734 at SEQ ID NO. 165
  misc_feature (95)..(95): Xaa is any aa, unknown, or other
  misc_feature (116)..(116): Xaa is any aa, unknown, or other
  misc_feature (133)..(133): Xaa is any aa, unknown, or other
MPVRPTGGMKQEWEPVVLHKPKKAQDLRDPKVVNQALRTGAQVQTVKKFDAGLNKKATATSAVVNVRKLDEAAEPAALEKVPVEVRQAIQKARIXKKISQAELAKQINERPQVVAXYENGKAVPNQVVLAKMXKILGVKLRGKIHK

SEQ ID NO: 298 - protein, 144 aa, Vitis vinifera
  misc_feature (11)..(79): Pfam name: MBF1 Pfam desc: Multiprotein bridging factor 1
  misc_feature (87)..(141): Pfam name: HTH_3 Pfam desc: Helix-turn-helix
  misc_feature: Bit score of 296.3 for HMM based on sequences of Figure 3
  misc_feature: Functional Homolog Of Ceres Clone ID no. 158734 at SEQ ID NO. 165
  misc_feature (62)..(62): Xaa is any aa, unknown, or other
  misc_feature (63)..(63): Xaa is any aa, unknown, or other
MPNRFVGALIQDWEPVFLRKSKPKAQELSDPKAVNKAIRSGAPVRTWKKFDGGANKKAAPFXXSRKLDEGTEPAALDRVSVDVSQVIQKARLEKKMSQAELAKLISERPQVVQEFEVGKAVPSQAVLAKMEKVLGVKLRGKISK

SEQ ID NO: 299 - protein, 141 aa, Pinus taeda
  misc_feature (11)..(79): Pfam name: MBF1 Pfam desc: Multiprotein bridging factor 1
  misc_feature (87)..(141): Pfam name: HTH_3 Pfam desc: Helix-turn-helix
  misc_feature: Bit score of 303.7 for HMM based on sequences of Figure 3
  misc_feature: Functional Homolog Of Ceres Clone ID no. 158734 at SEQ ID NO. 165
  misc_feature (133)..(133): Xaa is any aa, unknown, or other
MPSRTNGPITQDWTPVVIHKRPQKASEARDPKAVNAAIRAGGQVQSIKKFEGGTNKKVQPPVNTRKLDEETEPAALQKVPAEVRHAIQKARLDQKLSQAELGKRINERAQVIQEYESGKAVPNQAILSKLEKXLGVKLRGK

SEQ ID NO: 300 - protein, 142 aa, Pinus pinaster
  misc_feature (11)..(79): Pfam name: MBF1 Pfam desc: Multiprotein bridging factor 1
  misc_feature (87)..(141): Pfam name: HTH_3 Pfam desc: Helix-turn-helix
  misc_feature: Bit score of 305.1 for HMM based on sequences of Figure 3
  misc_feature: Functional Homolog Of Ceres Clone ID no. 158734 at SEQ ID NO. 165
MPSRTNGPITQDWTPVVIHKRPQKASQARDPKAVNAAIRAGGQVQSIKKFEGGTNKKVQPPVNTRKLDEETEPAALQKVPAEVRHAIQKARLDQKLSQAELGKRINERAQVIQEYESGKAIPNQAILSKLEKALGVKLRGKL

SEQ ID NO: 301 - protein, 142 aa, Picea sitchensis
  misc_feature (11)..(79): Pfam name: MBF1 Pfam desc: Multiprotein bridging factor 1
  misc_feature (87)..(141): Pfam name: HTH_3 Pfam desc: Helix-turn-helix
  misc_feature: Bit score of 299.7 for HMM based on sequences of Figure 3
  misc_feature: Functional Homolog Of Ceres Clone ID no. 158734 at SEQ ID NO. 165
MPSRTNGPVTQDWTPVVIHKRPQKASEARDPEAVNAAIRAGARVQSIKKFEGGSNKKAQPPLNTRKLDEETEPAALQKVPVEIRHAIQKARRDQKLSQAELGKRINERAQVIQEYESGKAIPNQAILSKLEKVLGVKLRGEL

SEQ ID NO: 302 - protein, 143 aa, Solanum lycopersicum
  misc_feature (11)..(80): Pfam name: MBF1 Pfam desc: Multiprotein bridging factor 1
  misc_feature (88)..(142): Pfam name: HTH_3 Pfam desc: Helix-turn-helix
  misc_feature: Bit score of 303.2 for HMM based on sequences of Figure 3
  misc_feature: Functional Homolog Of Ceres Clone ID no. 158734 at SEQ ID NO. 165
MPMRPTGGLKQDWDPIVLQKPKMKAQDLKDPKIVNQALRAGAQVQTVKKIDAGLNKKAATLAVNVRKLDEAAEPAALEKLPVGVRQAIQKARIEKKMSQADLAKKINERTQVVAEYENGKAVPNQLVLGKMENVLGVKLRGKI

SEQ ID NO: 303 - protein, 138 aa, Chamaecyparis obtusa
  misc_feature (11)..(80): Pfam name: MBF1 Pfam desc: Multiprotein bridging factor 1
  misc_feature (88)..(137): Pfam name: HTH_3 Pfam desc: Helix-turn-helix
  misc_feature: Bit score of 277.3 for HMM based on sequences of Figure 3
  misc_feature: Functional Homolog Of Ceres Clone ID no. 158734 at SEQ ID NO. 165
MPSRPGVPVTQDWAPVVLHKRPQKSSEARDPKAVNAALRAGAKVETLKKSDGGQNKKTQQPAVNARKLDEETEPAALQKISPEVRQAIQKARLEQKMSQAELAKRINERPQVVQEYESGKAVPNQAILSKMERALGIK

SEQ ID NO: 304 - protein, 132 aa, Mesembryanthemum crystallinum
  misc_feature (11)..(80): Pfam name: MBF1 Pfam desc: Multiprotein bridging factor 1
  misc_feature: Bit score of 266.8 for HMM based on sequences of Figure 3
  misc_feature: Functional Homolog Of Ceres Clone ID no. 158734 at SEQ ID NO. 165
MPTRPQGPIRQDWDPVVLHKSRPKAQDLRDPKAVNQALRSGIAVETVKKAVAGANKKAATPVVNARKLDEETEPAALAKVPGEVRHKIQKARIEKKMSQAELAEQINERPQVVQEYENGKAVPNQMVLGKME

SEQ ID NO: 305 - protein, 140 aa, Pinus taeda
  misc_feature (11)..(79): Pfam name: MBF1 Pfam desc: Multiprotein bridging factor 1
  misc_feature (87)..(140): Pfam name: HTH_3 Pfam desc: Helix-turn-helix
  misc_feature: Bit score of 296.0 for HMM based on sequences of Figure 3
  misc_feature: Functional Homolog Of Ceres Clone ID no. 158734 at SEQ ID NO. 165
MPSRTNGPITQDWTPVVIHKRPQKASEARDPKAVNAAIRAGGQVQSIKKFEGGTNKKVQPPVNTRKLDEETEPAALQKVPAEVRHAIQKARLDQKLSQAELGKRINERAQIQEYESGKAIPNQAILSKLEKVLGVKLRGK

SEQ ID NO: 306 - protein, 143 aa, Nicotiana langsdorffii
  misc_feature (11)..(81): Pfam name: MBF1 Pfam desc: Multiprotein bridging factor 1
  misc_feature (89)..(143): Pfam name: HTH_3 Pfam desc: Helix-turn-helix
  misc_feature: Bit score of 271.2 for HMM based on sequences of Figure 3
  misc_feature: Functional Homolog Of Ceres Clone ID no. 158734 at SEQ ID NO. 165
  misc_feature (128)..(128): Xaa is any aa, unknown, or other
  misc_feature (130)..(130): Xaa is any aa, unknown, or other
  misc_feature (132)..(132): Xaa is any aa, unknown, or other
  misc_feature (134)..(134): Xaa is any aa, unknown, or other
MPVRPTGGMKQEWEPVVLHKPKKPQDLRDPKAVNQALRTGAQVQTVKKFDAGLNKKTTAASAVVNVRKLDEAAEPAALEKVPVEVRQAIQKARIEKKMSQSDLAKQINERPQVVAEYENGKAVPNQLXLXKXKXILGVNLRGK

SEQ ID NO: 307 - protein, 140 aa, Malus x
  misc_feature (11)..(79): Pfam name: MBF1 Pfam desc: Multiprotein bridging factor 1
  misc_feature: Bit score of 259.1 for HMM based on sequences of Figure 3
  misc_feature: Functional Homolog Of Ceres Clone ID no. 158734 at SEQ ID NO. 165
MPSRNPGVISQDWEPVVLQKKPNKASALRDPKAVNQAMRSGAPVLTIKKFDGGSNKKAGPVVIVKKLEEAAEPAALERVSTDVRQAIQKARLEKKMSQAELAKRINERPQVVQDYDNGKAVPKHAVQAKMEKVQEIKHRG

SEQ ID NO: 308 - protein, 137 aa, Malus x
  misc_feature (11)..(79): Pfam name: MBF1 Pfam desc: Multiprotein bridging factor 1
  misc_feature: Bit score of 243.5 for HMM based on sequences of Figure 3
  misc_feature: Functional Homolog Of Ceres Clone ID no. 158734 at SEQ ID NO. 165
MPSRNPGVISQDWEPVVLQKKPNKASALRDPKAVNQAMRSGAPVQTIKKFDGGSNKKAGPVVSVKKLEEAAEPAALERVSTEVRQAIHKARLEKKMNQAELVNPINERPQVVQEFENGKAVPTPALPANMARVLGTK

SEQ ID NO: 309 - protein, 141 aa, Physcomitrella patens
  misc_feature (11)..(79): Pfam name: MBF1 Pfam desc: Multiprotein bridging factor 1
  misc_feature (87)..(141): Pfam name: HTH_3 Pfam desc: Helix-turn-helix
  misc_feature: Bit score of 290.9 for HMM based on sequences of Figure 3
  misc_feature: Functional Homolog Of Ceres Clone ID no. 158734 at SEQ ID NO. 165
MPARTAGPISQDWAPVVVHKRPVKAADARDPKAIAAAIRAGAEVQTVRKFDSGTNKKTGPSLNARKLDEEHEPAPLERVSSEIKHSIQKARLDKKLTQAQLAQLINERPQVVQEYESGKAIPSQQVLAKLERALGVKLRGK

SEQ ID NO: 310 - protein, 142 aa, Picea glauca
  misc_feature (11)..(79): Pfam name: MBF1 Pfam desc: Multiprotein bridging factor 1
  misc_feature (87)..(141): Pfam name: HTH_3 Pfam desc: Helix-turn-helix
  misc_feature: Bit score of 271.6 for HMM based on sequences of Figure 3
  misc_feature: Functional Homolog Of Ceres Clone ID no. 158734 at SEQ ID NO. 165
MPSRTNGPITQDWTPVDIHQRPQKASEARDPKAVNAAIRAGAQVPSIMKFEGGSNMKAQPPLNTRKLDEETEPAALHKVPVEIPHAIQKARLDQKLSQAELGKRINDTAQVFQEYESSKAIPNQAILSKLDKVLGVKLRGKL

SEQ ID NO: 311 - protein, 141 aa, Physcomitrella patens
  misc_feature (11)..(79): Pfam name: MBF1 Pfam desc: Multiprotein bridging factor 1
  misc_feature (87)..(141): Pfam name: HTH_3 Pfam desc: Helix-turn-helix
  misc_feature: Bit score of 286.2 for HMM based on sequences of Figure 3
  misc_feature: Functional Homolog Of Ceres Clone ID no. 158734 at SEQ ID NO. 165
MPARTAGPISQDWAPVVVHKRPVKAADARDPKAIAAAIRAGAEVQTVRKFDFGTNKKTGPSLNARKLDEEHEPAPLERVSFEIKHSIQKARLDKKLTQAQLGQLINERPQVVQEYESGKAIPSQQVLAKLERALGVKLRGK

SEQ ID NO: 312 - protein, 141 aa, Physcomitrella patens
  misc_feature (11)..(79): Pfam name: MBF1 Pfam desc: Multiprotein bridging factor 1
  misc_feature (87)..(141): Pfam name: HTH_3 Pfam desc: Helix-turn-helix
  misc_feature: Bit score of 284.8 for HMM based on sequences of Figure 3
  misc_feature: Functional Homolog Of Ceres Clone ID no. 158734 at SEQ ID NO. 165
MPARTAGPISQDWAPVVVHKRPVKAADARDPKAIAAAIRAGAEVQTVRKFDFGTNKKTGPSLNARKLDEEHEPAPLERVSFEIKHSIQKARLDKKLTQAQLGQLINERPQVVQEYESGKAIPLQQVLAKLERALGVKLRGK

SEQ ID NO: 313 - protein, 127 aa, Pinus taeda
  misc_feature (11)..(79): Pfam name: MBF1 Pfam desc: Multiprotein bridging factor 1
  misc_feature: Bit score of 237.0 for HMM based on sequences of Figure 3
  misc_feature: Functional Homolog Of Ceres Clone ID no. 158734 at SEQ ID NO. 165
  misc_feature (113)..(113): Xaa is any aa, unknown, or other
  misc_feature (124)..(124): Xaa is any aa, unknown, or other
  misc_feature (125)..(125): Xaa is any aa, unknown, or other
MPSRTNGPITQDWTPVVIHKRPQKASEARDPKAVNAAIRAGGQVQSIKKFEGGTNKKVQPPVNTRKLDEETEPAALQKVPAEVRHAIQKARLDQKLSQAELGKRINERAQVIXEYESGKAIPNXXIL

SEQ ID NO: 314 - DNA, 1943 bp, Arabidopsis thaliana
  misc_feature: Ceres Annot ID no. 876994
  misc_feature: Encodes the peptide sequence at SEQ ID NO. 315
tttttccccattttcttactctcttgccctttcttctctcactctccggcgactgttacgagtttttaacacttccgtcgtcttctcagttgttgttgttgtttatgacaagatcttgttctatccattaaaaccaaagaaatggaggaaggtcataaagaaccattggtgctaagagttgaaggatcacattgttctttatcagagatggatgattttgatctaactcgggctttagagaagccgaggcagctaaagatcgaacggaagagatcgtttgacgaaaggtcgatgagcgagttatcgactggctatgtaagacaagatagcattttagaaatggctcattctcctggaagtaggtcaatggtggacactcctctctctgttaggaactctttcgagcctcatccgatggttgctgaggcttgggaagctttgagaaggtcaatggtgttctttcgtggtcaacccgttggtaccattgcagcttatgaccatgcctccgaggaggtcttgaactatgatcaggtgtttgtacgtgactttgtaccaagtgcattggcgtttctgatgaatggagagcccgatatagtgaaaaacttcttgctcaagacacttcagcttcaaggttgggagaaacgggttgaccggttcaagcttggggaaggcgttatgccagcgagtttcaaggtgcttcatgatccagttcgtaaaaccgacacaattattgcggattttggagaaagcgctataggaagagtagcaccggtggattcaggattctggtggatcatacttctccgtgcttacacgaaatctacgggagatttgactttatctgagacaccagagtgtcagaggggaatgaggcttatactctctctttgcttatccgaaggttttgatactttccctacgcttctttgtgctgacggttgttctatggttgataggagaatgggtgtttatggatatccaatagagattcaagctctgtttttcatggcattgagatgcgccttgtcgatgcttaaaccagacgaggaaggtcgagatttcatagaaaggattgtgaagagacttcacgcgctgagtttccatatgcgcagttacttttggcttgactttcaacaactcaacgatatctataggtacaagacagaggagtactcacacaccgcggtgaacaagttcaacgtgatgccggactcgataccagactgggttttcgactttatgcctctccgtggaggatattttgtcggcaatgtaagcccggcccgtatggatttcaggtggttttccttaggaaattgtgtctccatcctttcttccttggcaactccggatcagtcaatggctattatggacctcctcgagcaccgttgggaggagctagtaggcgagatgccgctcaagatatgttacccttgcatcgaaagccacgagtggcggattgttaccggttgtgatcctaaaaacacgaggtggagttaccacaacggtggatcttggccagtattgctgtggacgctgacggcggcatgcatcaagactggacggcctcaaatagcgagacgtgcgattgatctaattgaatcacggctacaccgagattgctggccggaatactatgatggtaagcaaggaaggtacgttggaaaacaagcaaggaagtaccagacttggtcaatcgcgggttacttggttgcgaaaatgatgcttgaagatccttcacatattggaatgatctctcttgaagaagacaaacagatgaaacctgttatcaagagatctgcttcatggacttgctgaattttgtttcttgttttgtattataatgtcatttgattaagcattcaaaagacctttaatcagcgagagagtagttctgtttgtatttctctttgatccaactatggtttattttcacttgaggc

SEQ ID NO: 315 - protein, 558 aa, Arabidopsis thaliana
  misc_feature (84)..(551): Pfam name: Invertase_neut Pfam desc: Plant neutral invertase
  misc_feature: Ceres Annot ID no. 876994
  misc_feature: in Figure 4
  misc_feature: Bit score of 1527.6 for HMM based on sequences of Figure 4
MEEGHKEPLVLRVEGSHCSLSEMDDFDLTRALEKPRQLKIERKRSFDERSMSELSTGYVRQDSILEMAHSPGSRSMVDTPLSVRNSFEPHPMVAEAWEALRRSMVFFRGQPVGTIAAYDHASEEVLNYDQVFVRDFVPSALAFLMNGEPDIVKNFLLKTLQLQGWEKRVDRFKLGEGVMPASFKVLHDPVRKTDTIIADFGESAIGRVAPVDSGFWWIILLRAYTKSTGDLTLSETPECQRGMRLILSLCLSEGFDTFPTLLCADGCSMVDRRMGVYGYPIEIQALFFMALRCALSMLKPDEEGRDFIERIVKRLHALSFHMRSYFWLDFQQLNDIYRYKTEEYSHTAVNKFNVMPDSIPDWVFDFMPLRGGYFVGNVSPARMDFRWFSLGNCVSILSSLATPDQSMAIMDLLEHRWEELVGEMPLKICYPCIESHEWRIVTGCDPKNTRWSYHNGGSWPVLLWTLTAACIKTGRPQIARRAIDLIESRLHRDCWPEYYDGKQGRYVGKQARKYQTWSIAGYLVAKMMLEDPSHIGMISLEEDKQMKPVIKRSASWTC

SEQ ID NO: 316 - DNA, 1944 bp, Arabidopsis thaliana
  misc_feature: Ceres cDNA ID no. 1498985
  misc_feature: Encodes the peptide sequence at SEQ ID NO. 317
tttttttccccattttcttactctcttgccctttcttctctcactctccggcgactgttacgagtttttaacacttccgtcgtcttctcagttgttgttgttgtttatgacaagatcttgttctatccattaaaaccaaagaaatggaggaaggtcataaagaaccattggtgctaagagttgaaggatcacattgttctttatcagagatggatgattttgatctaactcgggctttagagaagccgaggcagctaaagatcgaacggaagagatcgtttgacgaaaggtcgatgagcgagttatcgactggctatgtaagacaagatagcattttagaaatggctcattctccgaagtaggtcaatggtggacactcctctctctgttaggaactctttcgagcctcatccgatggttgctgaggcttgggaagctttgagaaggtcaatggtgttctttcgtggtcaacccgttggtaccattgcagcttatgaccatgcctccgaggaggtcttgaactatgatcaggtgtttgtacgtgactttgtaccaagtgcattggcgtttctgatgaatggagagcccgatatagtgaaaaacttcttgctcaagacacttcagcttcaaggttgggagaaacgggttgaccggttcaagcttggggaaggcgttatgccagcgagtttcaaggtgcttcatgatccagttcgtaaaaccgacacaattattgcggattttggagaaagcgctataggaagagtagcaccggtggattcaggattctggtggatcatacttctccgtgcttacacgaaatctacgggagatttgactttatctgagacaccagagtgtcagaggggaatgaggcttatactctctctttgcttatccgaaggttttgatactttccctacgcttctttgtgctgacggttgttctatggttgataggagaatgggtgtttatggatatccaatagagattcaagctctgtttttcatggcattgagatgcgccttgtcgatgcttaaaccagacgaggaaggtcgagatttcatagaaaggattgtgaagagacttcacgcgctgagtttccatatgcgcagttacttttggcttgactttcaacaactcaacgatatctataggtacaagacagaggagtactcacacaccgcggtgaacaagttcaacgtgatgccggactcgataccagactgggttttcgactttatgcctctccgtggaggatattttgtcggcaatgtaagcccggcccgtatggatttcaggtggttttccttaggaaattgtgtctccatcctttcttccttggcaactccggatcagtcaatggctattatggacctcctcgagcaccgttgggaggagctagtaggcgagatgccgctcaagatatgttacccttgcatcgaaagccacgagtggcggattgttaccggttgtgatcctaaaaacacgaggtggagttaccacaacggtggatcttggccagtattgctgtggacgctgacggaggcatgcatcaagactggacggcctcaaatagcgagacgtgcgattgatctaattgaatcacggctacaccgagattgctggccggaatactatgatggtaagcaaggaaggtacgttggaaaacaagcaaggaagtaccagacttggtcaatcgcgggttacttggttgcgaaaatgatgcttgaagatccttcacatattggaatgatctctcttgaagaagacaaacagatgaaacctgttatcaagagatctgcttcatggacttgctgaattttgtttcttgttttgtattataatgtcatttgattaagcattcaaaagacctttaatcagcgagagagtagttctgtttgtatttctctttgatccaactatggtttattttcacttgaggct

SEQ ID NO: 317 - protein, 483 aa, Arabidopsis thaliana
  misc_feature (9)..(476): Pfam name: Invertase_neut Pfam desc: Plant neutral invertase
  misc_feature: Ceres cDNA ID no. 1498985
  misc_feature: Bit score of 1339.5 for HMM based on sequences of Figure 4
  misc_feature: Functional Homolog Of Ceres Annot ID no. 876994 at SEQ ID NO. 315
MVDTPLSVRNSFEPHPMVAEAWEALRRSMVFFRGQPVGTIAAYDHASEEVLNYDQVFVRDFVPSALAFLMNGEPDIVKNFLLKTLQLQGWEKRVDRFKLGEGVMPASFKVLHDPVRKTDTIIADFGESAIGRVAPVDSGFWWIILLRAYTKSTGDLTLSETPECQRGMRLILSLCLSEGFDTFPTLLCADGCSMVDRRMGVYGYPIEIQALFFMALRCALSMLKPDEEGRDFIERIVKRLHALSFHMRSYFWLDFQQLNDIYRYKTEEYSHTAVNKFNVMPDSIPDWVFDFMPLRGGYFVGNVSPARMDFRWFSLGNCVSILSSLATPDQSMAIMDLLEHRWEELVGEMPLKICYPCIESHEWRIVTGCDPKNTRWSYHNGGSWPVLLWTLTEACIKTGRPQIARRAIDLIESRLHRDCWPEYYDGKQGRYVGKQARKYQTWSIAGYLVAKMMLEDPSHIGMISLEEDKQMKPVIKRSASWTC

SEQ ID NO: 318 - DNA, 1987 bp, Arabidopsis thaliana
  misc_feature: Ceres Annot ID no. 866611
  misc_feature: Encodes the peptide sequence at SEQ ID NO. 319
tctcctataaatctctccgtcttctctcttctctcatttcacgtcggagatcattttctcctcctccgcctccgcctccaccgccaccgccaccgccgccgccgacgacttttctcacttactcaacaccagagatcttggtttagtgttataatggaaggtgttggactaagagctgtaggatcacactgttctttatctgagatggatgatcttgatttgactcgagctttggataaaccaagattgaagatcgaaaggaagagatcgtttgatgaaagatcgatgagtgagctatcgactggttacagtagacatgacggtatacacgattcgccgcgaggtagatcggtgcttgatacgcctctttcttctgctagaaactcctttgagcctcatcctatgatggctgaagcttgggaggctttaagaaggtcaatggtcttcttccgtggtcaacctgttggtactcttgccgcggttgataatactaccgatgaagtcttgaactatgatcaggtgtttgtgagggattttgtaccgagtgcgttggcgtttctgatgaatggagaaccggatatagtgaagcattttttgcttaagacacttcagctgcaaggttgggagaaacgtgtggatcggtttaagttaggagaaggtgtgatgcctgcaagtttcaaggtgcttcatgatcctatccgtgaaacggataacattgttgcggatttcggtgagagtgctattggacgtgtggctcctgtagattcagggttctggtggattattcttcttcgtgcttataccaaatctactggagatttgactctctctgagacaccagagtgtcaaaagggaatgaaactgatcttgtctttgtgcttagctgaagggtttgacacgtttcctacactgctttgtgctgatggatgttccatgattgatcgaagaatgggtgtttatgggtatcccattgagatccaagcgttgttcttcatggctttgagatctgctttgtcgatgttaaagcccgatggagatggcagagaggtcattgagaggatcgttaagcgacttcatgccttgagcttccatatgcgcaattacttctggcttgatcatcagaacctcaatgacatttacaggttcaagactgaggaatactctcacacggcggtgaacaagttcaatgtgatgcctgattctatacccgagtgggttttcgacttcatgcctctccgtggaggctactttgtgggaaacgtaggacctgcccatatggatttccggtggttcgcactcggtaattgtgtctccatactttcttcattggccactccagatcaatccatggccattatggacctccttgagcaccggtgggcagagcttgtaggtgagatgcctctcaagatttgttatccatgcctcgagggccatgagtggcgcatcgttactggctgtgaccccaagaacacacggtggagctaccacaatggtggatcttggccagttttgctgtggcagctaacagcagcgtgcattaagacagggagaccgcagatcgcaagacgcgcggttgacctcatagaatcgcgtcttcaccgagactgttggccagagtattacgacggtaagctcggaaggtacgttggaaaacaggcaaggaaataccagacttggtcaatcgcaggttacttagtggcgaaaatgttgctagaagatccttcacacattggtatgatctctcttgaagaagacaaactcatgaaaccagtcatcaagcgatctgcgtcttggccacaactctgaaaaaccgctttaggtttttgttccggttctaatatttgccacgatatgattttttgttgttgttgtttgtatgataatgttattgaaaacttgtgcggggacatagactttttattgattgctttctttcttgctttgcaagtaaggaaaaagaaaatgggaaaagctcgtttgccgt

SEQ ID NO: 319 - protein, 551 aa, Arabidopsis thaliana
  misc_feature (76)..(543): Pfam name: Invertase_neut Pfam desc: Plant neutral invertase
  misc_feature: Ceres Annot ID no. 866611
  misc_feature: Bit score of 1471.3 for HMM based on sequences of Figure 4
  misc_feature: Functional Homolog Of Ceres Annot ID no. 876994 at SEQ ID NO. 315
MEGVGLRAVGSHCSLSEMDDLDLTRALDKPRLKIERKRSFDERSMSELSTGYSRHDGIHDSPRGRSVLDTPLSSARNSFEPHPMMAEAWEALRRSMVFFRGQPVGTLAAVDNTTDEVLNYDQVFVRDFVPSALAFLMNGEPDIVKHFLLKTLQLQGWEKRVDRFKLGEGVMPASFKVLHDPIRETDNIVADFGESAIGRVAPVDSGFWWIILLRAYTKSTGDLTLSETPECQKGMKLILSLCLAEGFDTFPTLLCADGCSMIDRRMGVYGYPIEIQALFFMALRSALSMLKPDGDGREVIERIVKRLHALSFHMRNYFWLDHQNLNDIYRFKTEEYSHTAVNKFNVMPDSIPEWVFDFMPLRGGYFVGNVGPAHMDFRWFALGNCVSILSSLATPDQSMAIMDLLEHRWAELVGEMPLKICYPCLEGHEWRIVTGCDPKNTRWSYHNGGSWPVLLWQLTAACIKTGRPQIARRAVDLIESRLHRDCWPEYYDGKLGRYVGKQARKYQTWSIAGYLVAKMLLEDPSHIGMISLEEDKLMKPVIKRSASWPQL

SEQ ID NO: 320 - DNA, 1500 bp, Arabidopsis thaliana
  misc_feature: Ceres Annot ID no. 838033
  misc_feature: Encodes the peptide sequence at SEQ ID NO. 321
atgtctttaagcctttacgacagtgcacattcactagacggtaagtctggttgggatactccggttttctccatgaaagactcaatggatcgtaacccgatggtcacagaagcttgggaggctctctgccagtctcaggtctacttccggggaaaaccggtaggaaccatcgccgcctacgaccatgcttcagaagaggtcttgaactatgatcaggtgttcgtacgtgattttgtaccgagtgctctagcatttctgatgaatggagagcctgaaattgtgaagaactttctcctgaagacacttcatattcagggacaagacaaaatgatcgacaagttcaagcttggtgacggcgcaatgccagcaagctttaaagttctacataatcctatcaagaagacggatacgattatcgctgactttggagaaagcgccatcgggagagtggctccagtcgactctggcttctggtggatcattctcctccgagcttacactaagtctacaggagatcattctctagcagagagaccagagtgccaaaagggaatgagactcatactttctttgtgtctctctgagggttttgatacttttccgactttgctttgcgcagatggttgctcgatggtcgatcgtagaatgggcatttacggctatccgattgagatccaagccctctttttcatggctcttcgatccgcactctcaatgctgaaacatgattctgagggtaaagagttcatggaaaagatagtgaagcggctgcacgcactaagcttccatatgagaagctacttttggctcgatttccagcagctcaatgacatttaccgttacaagacggaggagtactctcacaccgcggtaaacaagttcaacgtaatccctgactccatccctgattggatctttgacttcatgcctctccgaggtggctacttcgttggaaatgtcagtcccgcccgcatggacttcaggtggtttgcgttaggaaattgtatcgcaattctttcctcattggccacaccagagcagtccatggcgatcatggacctgattgaggcccggtgggaagaacttgtgggagagatgccgttgaagatatgttatccggcgatggagagtcacgagtgggggattgtcactggctgtgaccctaagaacacaaggtggagctaccacaacggaggctcttggccagtgcttctatggttactaacggcggcaagcataaagactggacggccacaaatagcacgacgggctatagagttggcggaggcacgactgttgaaggatggatggccggagtactacgacggaaagtctggaagattcatcggaaaacaggctaggaaatctcagacatggtcaatcgctggctatttggtcgccaagatgatgatggatgatccaacgcatgtgggaatgatctcaatggaagaagagaaacatatgaaacctcctcttagaagatcttcttcttggacttaa

SEQ ID NO: 321 - protein, 499 aa, Arabidopsis thaliana
  misc_feature (26)..(493): Pfam name: Invertase_neut Pfam desc: Plant neutral invertase
  misc_feature: Ceres Annot ID no. 838033
  misc_feature: Bit score of 1287.6 for HMM based on sequences of Figure 4
  misc_feature: Functional Homolog Of Ceres Annot ID no. 876994 at SEQ ID NO. 315
MSLSLYDSAHSLDGKSGWDTPVFSMKDSMDRNPMVTEAWEALCQSQVYFRGKPVGTIAAYDHASEEVLNYDQVFVRDFVPSALAFLMNGEPEIVKNFLLKTLHIQGQDKMIDKFKLGDGAMPASFKVLHNPIKKTDTIIADFGESAIGRVAPVDSGFWWIILLRAYTKSTGDHSLAERPECQKGMRLILSLCLSEGFDTFPTLLCADGCSMVDRRMGIYGYPIEIQALFFMALRSALSMLKHDSEGKEFMEKIVKRLHALSFHMRSYFWLDFQQLNDIYRYKTEEYSHTAVNKFNVIPDSIPDWIFDFMPLRGGYFVGNVSPARMDFRWFALGNCIAILSSLATPEQSMAIMDLIEARWEELVGEMPLKICYPAMESHEWGIVTGCDPKNTRWSYHNGGSWPVLLWLLTAASIKTGRPQIARRAIELAEARLLKDGWPEYYDGKSGRFIGKQARKSQTWSIAGYLVAKMMMDDPTHVGMISMEEEKHMKPPLRRSSSWT

SEQ ID NO: 322 - DNA, 1770 bp, Arabidopsis thaliana
  misc_feature: Ceres Clone ID no. 6399
  misc_feature: Encodes the peptide sequence at SEQ ID NO. 323
atatttatcacatttttcttcaccggctgatttgtttgcccggagattatctctccgtcgtaattaagatctatacacacagaaacacaaagttaaagaatcctcatggaaggagtaaactcttcaagctctatatccgacctagacgaattggctcggttacttgaccggccgagggtaaatattgaacggaaaagatcgtttgacgagaggtccttcagcgaaatgggaatcttcgacaacgttaattctcccggaggatgggaaactccggtgtcttcggctagaaactcgtttgagccacatcctatggttgcagaggcttgggatgctttgagacgatcattggtttactttcgtggccaaccggttggtactatcgctgcttatgaccatgctactgaggaagtcttgaattatgatcaggttttcgtaagagactttgttccaagtgcactagcttttctcatgaacggagaaccagacatagttaaaaaactttctcctcaagacaattcaaatccaaggaagggagaaaagaatagaccgattcaagctcggtgaaggcgcaatgccggctagtttcaaggtcattcacgacccgatcaaggaaaccgactctatcaatgctgactttggcgagagcgcgattggaagagtggctccggtggactcaggtttctggtggatcattctccttagagcctacacaaaatccaccggagacacttctctagctgaaacatctgaatgtcaaaagggaatgagactcattctctctctttgtctctccgaaggtttcgatactttccctaccttactttgtgctgatggctgctccatgatcgatcgaagaatgggggtttacgggtatccgatagagatccaagctctcttcttcatggctcttagatcagcaatgtcgatgctaaagcacgacgcggaaggtaaagagttcatggagaggatagtgaagcggctacacgcgcttagcttccacatgagaagttatttctggctcgattttcagcagctcaacgacatttaccgttacaaaacagaagagtactcgcacacagcggttaacaagttcaacgttatccctgactcgatccctgagtgggtcttcgatttcatgcctctacgtggcggttactttataggaaacgttagtccagctcgtatggattttaggtggttcgctctaggcaactgcgtagcgatccttgcttctttagccacgcctgagcagtcggcttcaatcatggacttgatagaggaacggtgggaggagttggtcggagcgatgccggttaaaatttgtcatccggcaatcgagagccatgagtggaggattgttaccggttgcgaccctaagaatactcgttggagttaccataacggtggttcttggccagtattgttgtggctattaacagctgcatgcataaagacgggacggccacaaatagcaagacgggccatagacctggcggaagcacggctgttgaaggatggttggccggagtactacgacgggaaatcaggaaggttcatcggaaaacaggcgaggaagtttcagacatggtctatcgccggttacttggtcgccaagatgttgttggaagatccttctcatcttggaatgatctcattggaagaagacaaacagactaaacctgtcattaagagatcttattcttggacttgataatttgttgtcaattcttttgagaagagcaggctaaaatttgatctaaattttgttac

SEQ ID NO: 323 - protein, 379 aa, Arabidopsis thaliana
  misc_feature (1)..(373): Pfam name: Invertase_neut Pfam desc: Plant neutral invertase
  misc_feature: Ceres Clone ID no. 6399
  misc_feature: Bit score of 881.7 for HMM based on sequences of Figure 4
  misc_feature: Functional Homolog Of Ceres Annot ID no. 876994 at SEQ ID NO. 315
MPASFKVIHDPIKETDSINADFGESAIGRVAPVDSGFWWIILLRAYTKSTGDTSLAETSECQKGMRLILSLCLSEGFDTFPTLLCADGCSMIDRRMGVYGYPIEIQALFFMALRSAMSMLKHDAEGKEFMERIVKRLHALSFHMRSYFWLDFQQLNDIYRYKTEEYSHTAVNKFNVIPDSIPEWVFDFMPLRGGYFIGNVSPARMDFRWFALGNCVAILASLATPEQSASIMDLIEERWEELVGAMPVKICHPAIESHEWRIVTGCDPKNTRWSYHNGGSWPVLLWLLTAACIKTGRPQIARRAIDLAEARLLKDGWPEYYDGKSGRFIGKQARKFQTWSIAGYLVAKMLLEDPSHLGMISLEEDKQTKPVIKRSYSWT

SEQ ID NO: 324 - DNA, 2167 bp, Arabidopsis thaliana
  misc_feature: Ceres Annot ID no. 883525
  misc_feature: Encodes the peptide sequence at SEQ ID NO. 325
ggaccagtcgtcactttaccggatttttgttttggtgctcgacgactctgattcgaaatctctctctctcggaaaagctgaatctggatcatcaaagtatcattttaaagtttgatcatttcttctttgggtatatagggtagtattcaaaatggcagcttcagaaacagttctacgtgttccattaggatctgtatctcaatcttgctatctagcttccttctttgttaactcaacaccaaacctctcgtttaaacccgttagtagaaacagaaagaccgtccggtgtacaaactcgcatgaggtctcaagcgtaccaaaacattcatttcatagttcaaactctgttttgaaaggtaaaaagtttgtttccacgatatgcaaatgccaaaaacatgatgttgaggagagtattagatcaacgttacttccatctgacggtttgagcagtgaattgaaaagtgacttagatgaaatgcctttacctgttaatggaagtgtttcatctaatggtaatgcacaatcagttggaacaaagtctattgaggatgaagcttgggatctgttgaggcagtctgttgttttctattgtggaagtcctattggaactattgctgctaatgatccgaactctactagtgttttgaattatgatcaggtctttattcgtgatttcataccttcggggatcgcctttcttcttaaaggagagtatgatattgttcgcaatttcatcctttacactctccagttacagagttgggagaaaaccatggattgccatagtccaggtcaaggtttgatgccttgtagtttcaaggtgaaaactgttcctctcgatggcgatgattcaatgaccgaagaagtgttagatcctgattttggtgaagcagctattggacgtgttgccccggttgattctggcttgtggtggattattttgttgagagcatatggaaaatgcactggtgatctttccgtgcaggaaagagttgatgtgcagactggaatcaagatgatcttaaagctgtgtctcgctgatggtttcgatatgtttcctactttgttagttactgatgggtcctgcatgatagaccgtcgaatgggaatccatggtcatcccctggagattcaggcactcttttattcggctttggtctgcgctcgtgagatgcttacgccagaggacgggtcagctgatctaatccgagctctcaacaatcgtcttgttgctttaaatttccacatcagggaatactactggttggacctgaaaaagattaatgaaatataccgttaccagaccgaggaatactcttacgatgcggttaataaattcaacatatatccagatcagatcccttcatggttagtggactttatgccgaacagaggaggatatttgattggaaaccttcagcctgctcacatggatttcagattctttactctggggaacctttggtctatagtgagcagtttggcttcaaatgatcaatcacatgcaattcttgatttcatcgaagccaaatgggcagaacttgtagcagacatgccacttaagatctgttaccctgctatggaaggtgaagaatggcgaattataaccggaagtgatccaaagaatactccttggtcttatcacaatggaggtgcatggccaactctgctatggcagctgacagttgcaagcatcaaaatgggtagaccagagattgcagaaaaggcggttgagttagccgagagacggatttccttagacaaatggcccgagtactacgataccaaaagagcaagattcatcggtaaacaggcacggctataccagacttggtccatcgcaggttacctagtggccaagctcctcttagcaaatccagctgcagcaaagttcctcactagtgaagaggattcggatttgagaaacgcattctcttgcatgctcagcgctaacccgaggaggacaagaggacccaaaaaagctcaacaaccatttattgtatgagaggctcagacttatttatttcaaagtgagccatggaggaggcatggaccttcaacagattgatacaaaaacgtgtcattgttgtgtaaatagtctctcttagaaacttacataaaaatagatgatgtttgtttttatcatattattaaaagcgtgtttggc

SEQ ID NO: 325 - protein, 617 aa, Arabidopsis thaliana
  misc_feature (123)..(595): Pfam name: Invertase_neut Pfam desc: Plant neutral invertase
  misc_feature: Ceres Annot ID no. 883525
  misc_feature: Bit score of 1223.2 for HMM based on sequences of Figure 4
  misc_feature: Functional Homolog Of Ceres Annot ID no. 876994 at SEQ ID NO. 315
MAASETVLRVPLGSVSQSCYLASFFVNSTPNLSFKPVSRNRKTVRCTNSHEVSSVPKHSFHSSNSVLKGKKFVSTICKCQKHDVEESIRSTLLPSDGLSSELKSDLDEMPLPVNGSVSSNGNAQSVGTKSIEDEAWDLLRQSVVFYCGSPIGTIAANDPNSTSVLNYDQVFIRDFIPSGIAFLLKGEYDIVRNFILYTLQLQSWEKTMDCHSPGQGLMPCSFKVKTVPLDGDDSMTEEVLDPDFGEAAIGRVAPVDSGLWWIILLRAYGKCTGDLSVQERVDVQTGIKMILKLCLADGFDMFPTLLVTDGSCMIDRRMGIHGHPLEIQALFYSALVCAREMLTPEDGSADLIRALNNRLVALNFHIREYYWLDLKKINEIYRYQTEEYSYDAVNKFNIYPDQIPSWLVDFMPNRGGYLIGNLQPAHMDFRFFTLGNLWSIVSSLASNDQSHAILDFIEAKWAELVADMPLKICYPAMEGEEWRIITGSDPKNTPWSYHNGGAWPTLLWQLTVASIKMGRPEIAEKAVELAERRISLDKWPEYYDTKRARFIGKQARLYQTWSIAGYLVAKLLLANPAAAKFLTSEEDSDLRNAFSCMLSANPRRTRGPKKAQQPFIV

SEQ ID NO: 326 - DNA, 2053 bp, Arabidopsis thaliana
  misc_feature: Ceres Annot ID no. 867752
  misc_feature: Encodes the peptide sequence at SEQ ID NO. 327
ctccattctccagatttccgtttccctcttcgaattctcatctctaaccatgagcgcaatctatctcctccgcaaaatttccacgaaaactccttcacgatttcacagaagcctcttcttctccactttctccaaggattcaccaccagatttatctcgaaccacctcaattcgccatttatcatcaagccagagattcgtctcttcgtccatttactgtttcccccaatcaaagattttaccaaatcgattttccgagaagacgacgggaatctccgtaagacaattctcaacatccgttgaaactaatctcagtgacaagagtttcgagagaattcatgttcaaagtgatgcaattttagaaaggatacacaaaaacgaagaagaagtagaaacagtttctattggtagtgagaaagttgtgagagaagagagtgaagctgagaaagaagcgtggaggattttggaaaacgctgttgttaggtattgtggttctccggttgggacagtggcggcgaatgatcctggagataagatgcctttgaattatgatcaagtttttataagagattttgtgccttctgctttggcttttttgcttaaaggtgaaggtgatattgttaggaactttctccttcatacattacagcttcagagttgggagaaaactgtagactgttacagtcctggacagggtttgatgcctgcaagttttaaagtaagaactgtggcgcttgatgagaacactacggaagaggttttggatccggattttggtgaatcagctattggtcgtgttgctcctgtggattctggtttgtggtggattattctcttgagggcatatggaaagataactggagatttctcgttacaagagaggatagatgttcagacagggataaagcttatcatgaacttgtgtttagcagatggatttgatatgtttccaacacttttggtcactgatggttcttgtatgattgatcgtcgtatgggtatccatggccaccctctcgaaatccaatcgttattctactcagcactaagatgctcccgtgagatgctttctgttaatgatagctctaaggatcttgtaagagccattaacaatagattaagtgctttgtcctttcatatcagagaatactactgggtggacataaaaaagatcaatgagatataccgttacaagacagaagagtattccacggatgcgactaacaagttcaacatctatcctgagcaaattcctccatggctcatggactggatacccgagcaaggtgggtatctccttgggaacctacaacctgcacacatggatttcagattcttcacgcttgggaacttttggtctattgtttcgtccttggctacaccaaagcagaatgaagctatattgaacttaattgaagctaaatgggacgatattattgggaatatgcctcttaagatctgttaccctgcattagagtacgatgattggcgtataataactggaagcgacccaaagaacacgccttggtcgtatcacaacagtggatcctggccaacacttctttggcagttcacattagcatgtatgaagatgggaagaccagagctagctgaaaaggctcttgcagtggctgagaagagactgttggcagatcgttggccagagtactacgacacccgatctggcaaattcattggaaagcagtctcgcctctaccagacatggacagtcgctggattcttgacttctaaactcctcctagcaaatccagagatggcatcactgttattctgggaagaagattacgaacttctcgatatttgtgcatgtggtcttagaaaatctgaccggaagaaatgctcccgagtcgctgccaagactcagattcttgttcgatgaatgcaaaacagtctcttttgctactctgaacattcgaacacaataagctttttaggctatagatcttacagaaattggaaaatcattacagaaacttgactgtcacatattattattatttatctctgtttgtgtgtatatatatatgattgc

SEQ ID NO: 327 - protein, 616 aa, Arabidopsis thaliana
  misc_feature (123)..(593): Pfam name: Invertase_neut Pfam desc: Plant neutral invertase
  misc_feature: Ceres Annot ID no. 867752
  misc_feature: Bit score of 1224.1 for HMM based on sequences of Figure 4
  misc_feature: Functional Homolog Of Ceres Annot ID no. 876994 at SEQ ID NO. 315
MSAIYLLRKISTKTPSRFHRSLFFSTFSKDSPPDLSRTTSIRHLSSSQRFVSSSIYCFPQSKILPNRFSEKTTGISVRQFSTSVETNLSDKSFERIHVQSDAILERIHKNEEEVETVSIGSEKVVREESEAEKEAWRILENAVVRYCGSPVGTVAANDPGDKMPLNYDQVFIRDFVPSALAFLLKGEGDIVRNFLLHTLQLQSWEKTVDCYSPGQGLMPASFKVRTVALDENTTEEVLDPDFGESAIGRVAPVDSGLWWIILLRAYGKITGDFSLQERIDVQTGIKLIMNLCLADGFDMFPTLLVTDGSCMIDRRMGIHGHPLEIQSLFYSALRCSREMLSVNDSSKDLVRAINNRLSALSFHIREYYWVDIKKINEIYRYKTEEYSTDATNKFNIYPEQIPPWLMDWIPEQGGYLLGNLQPAHMDFRFFTLGNFWSIVSSLATPKQNEAILNLIEAKWDDIIGNMPLKICYPALEYDDWRIITGSDPKNTPWSYHNSGSWPTLLWQFTLACMKMGRPELAEKALAVAEKRLLADRWPEYYDTRSGKFIGKQSRLYQTWTVAGFLTSKLLLANPEMASLLFWEEDYELLDICACGLRKSDRKKCSRVAAKTQILVR

SEQ ID NO: 328 - DNA, 2437 bp, Arabidopsis thaliana
  misc_feature: Ceres Annot ID no. 871059
  misc_feature: Encodes the peptide sequence at SEQ ID NO. 329
aaaccatttattcagacaacaaaaatatcttgcattcatttttgttactctcttaaaatctcattctttgattatcttctcttcccctgtaagtactccgatctaattatttgttcctatcagacatcccccaatttctacgatcggatttattcgtcgatcaagaagctggctaagttgtattgttggtgattgtatagtttttattattattcgagagaatgaacagtagaagctgtatctgtgtctctgcgatgaaaccctgttgtagatttcttattagttttagaagttcctcgcttttcggtttttctcccccgaactctggcaaattcatcaattcgtcgaagttacactgtacaaagattgattccaggagtattagatctggtattcattgccgtcggattgttctggatcggaatgctttttgtgattccgattccattagctggggaggaggaggatctagagttttaagagctagaggtagtagtagaggaagaggaaggggtgttttagtaattccccatgtagcttcagattttaggaactattcgacctcttcgttggattctcatgtaaatgataagagctttgagagtatgtttgtgaagccacttgtttttaaggaagtggaaaaaactgaagggataccgaaaagggaaaggggtaatgtaggaggaggaaaagatgctaattttggaaatgtgggtgtaagaaaggaaacagaacggtgtttgagtcagactgaggttgagaaggaggcgtggaagctgcttcgtggtgccgtggtgaactactgtgggttccctgtggggactgtagcggctaatgatccaggggatacgcagactttgaactatgatcaagtgtttattcgtgattttgttccttcggcgtatgcgtttatgcttgatggagaaggggagattgttagaaactttctccttcatacattgcagttgcagagctgggagaaaacagtggactgtcacagccctggcccggggctaatgccagcgagttttaaagtgaaatctgcgccacttgagggaaatgatggttcatttgaggagtttttagatccagactttggtggatcagccattggacgtgttagccctgttgactctggtttgtggtggatcatattgctgagagcttatggaaagctcacgggtgactacacgttgcaagagagaattgatgttcaaacagggatcaagttgatactcaagctttgtctagccgacggttttgacatgttcccgactctacttgtcactgacggatcatgtatggttgatcgaagaatggggattcatgggcatccacttgaaatccaagcattattctactccgctctccgttgtgctcgagagatgcttattgtgaatgatggaaccaagagcttagttactgcagtcaacaatcgcctaagtgctttatcattccatatcagagagtactattgggtggatattaagaaaatcaacgagatataccgttacaacacagaggagtattcagcagatgcaacaaacaagtttaacatatatccagaacagatccctacttggcttgtcgactggattcctgataaaggcggttacttcataggaaatctccagcctgctcacatggatttcagattcttcacacttggaaacctctgggccgttatttcgtctttgggaaaccaagaacagaatgaaggagtcatgacattgattgaagagaaatgggatgatcttgttgcaaacatgcctctcaagatctgttttccggctctggagaaagatgaatggcgaataatcaccggatctgatccaaagaatacgccttggtcatatcacaatggcggatcctggccaactctcctctggcagttcacattggcttgtattaagatgggaaagctagaactggcgaagaaagcagttgctgtagcagaaaaaaggctaaaggaagatgagtggcctgagtattatgacacgaaaagcggaaggtttgtggggaaacaatcaaggctttaccagacttggaccatagcgggtttcttggcagctaagaaactaatagagcaacctgagaaagcatcactcttgttctgggaagaggactatcagctgctcgagacttgtgtctgtggcctcagtaaaagcagcggaaggaagaacaagtgttcgcgtttcacacctccaagatcttagtttcctgaaacttaataaactcacgaaccaaagtccatatttaatcatattttgcttctgacgtttagcaaaacatccttgctaattaggacgatgaatcagtttcaaacttaacgtatttttaatttgaaaaaaggaatatatatgtttatgtttgccttttccttcttgtcggattacttttaaatctcaatgatgtggatataaataaaaccagattc

SEQ ID NO: 329 - protein, 664 aa, Arabidopsis thaliana
  misc_feature (171)..(643): Pfam name: Invertase_neut Pfam desc: Plant neutral invertase
  misc_feature: Ceres Annot ID no. 871059
  misc_feature: Bit score of 1196.9 for HMM based on sequences of Figure 4
  misc_feature: Functional Homolog Of Ceres Annot ID no. 876994 at SEQ ID NO. 315
MNSRSCICVSAMKPCCRFLISFRSSSLFGFSPPNSGKFINSSKLHCTKIDSRSIRSGIHCRRIVLDRNAFCDSDSISWGGGGSRVLRARGSSRGRGRGVLVIPHVASDFRNYSTSSLDSHVNDKSFESMFVKPLVFKEVEKTEGIPKRERGNVGGGKDANFGNVGVRKETERCLSQTEVEKEAWKLLRGAVVNYCGFPVGTVAANDPGDTQTLNYDQVFIRDFVPSAYAFMLDGEGEIVRNFLLHTLQLQSWEKTVDCHSPGPGLMPASFKVKSAPLEGNDGSFEEFLDPDFGGSAIGRVSPVDSGLWWIILLRAYGKLTGDYTLQERIDVQTGIKLILKLCLADGFDMFPTLLVTDGSCMVDRRMGIHGHPLEIQALFYSALRCAREMLIVNDGTKSLVTAVNNRLSALSFHIREYYWVDIKKINEIYRYNTEEYSADATNKFNIYPEQIPTWLVDWIPDKGGYFIGNLQPAHMDFRFFTLGNLWAVISSLGNQEQNEGVMTLIEEKWDDLVANMPLKICFPALEKDEWRIITGSDPKNTPWSYHNGGSWPTLLWQFTLACIKMGKLELAKKAVAVAEKRLKEDEWPEYYDTKSGRFVGKQSRLYQTWTIAGFLAAKKLIEQPEKASLLFWEEDYQLLETCVCGLSKSSGRKNKCSRFTPPRS

SEQ ID NO: 330 - protein, 487 aa, Arabidopsis thaliana
  misc_feature (21)..(481): Pfam name: Invertase_neut Pfam desc: Plant neutral invertase
  misc_feature: Public GI ID no. 12039257
  misc_feature: Bit score of 1299.7 for HMM based on sequences of Figure 4
  misc_feature: Functional Homolog Of Ceres Annot ID no. 876994 at SEQ ID NO. 315
MGIFDNVNSPGGWETPVSSARNSFEPHPMVAEAWDALRRSLVYFRGQPVGTIAAYDHATEEVLNYDQVFVRDFVPSALAFLMNGEPDIVKNFLLKTIQIQGREKRIDRFKLGEGAMPASFKVIHDPIKETDSINADFGESAIGRVAPVDSGFWWIILLRAYTKSTGDTSLAETSECQKGMRLILSLCLSEGFDTFPTLLCADGCSMIDRRMGVYGYPIEIQALFFMALRSAMSMLKHDAEGKEFMERIVKRLHALSFHMRSYFWLDFQQLNDIYRYKTEEYSHTAVNKFNVIPDSIPEWVFDFMPLRGGYFIGNVSPARMDFRWFALGNCVAILASLATPEQSASIMDLIEERWEELVGEMPVKICHPAIESHEWRIVTGCDPKNTRWSYHNGGSWPAACIKTGRPQIARRAIDLAEARLLKDGWPEYYDGKSGRFIGKQARKFQTWSIAGYLVAKMLLEDPSHLGMISLEEDKQTKPVIKRSYSWT

SEQ ID NO: 331 - protein, 556 aa, Vitis vinifera
  misc_feature (82)..(549): Pfam name: Invertase_neut Pfam desc: Plant neutral invertase
  misc_feature: Public GI ID no. 157352568
  misc_feature: in Figure 4
  misc_feature: Bit score of 1564.9 for HMM based on sequences of Figure 4
  misc_feature: Functional Homolog Of Ceres Annot ID no. 876994 at SEQ ID NO. 315
MDGSKEFGLKNVSSHCSISEMADYDLSRLLDKPRLNIERQRSFDERSMSELSIGLARHLEHLDSMYSPGGRSGFDTPASSARNSFEPHPMVNEAWEALRRSLVFFRGQPVGTIAAYDHASEEVLNYDQVFVRDFVPSALAFLMNGEPEIVKNFLLKTLHLQGWEKRIDRFKLGEGAMPASFKVLHDPIRKTDTLIADFGESAIGRVAPVDSGFWWIILLRAYTKSTGDLSLAETPECQKGMKLILTLCLSEGFDTFPTLLCADGCSMVDRRMGIYGYPIEIQALFFMALRCALAMLKQDSEGKECIERIVKRLHALSYHMRSYFWLDFQQLNDIYRYKTEEYSHTAVNKFNVIPDSIPEWVFDFMPTRGGYFIGNVSPARMDFRWFALGNCVAILSSLATPEQSMAIMDLIESRWEELVGEMPLKISYPAFENHEWRIITGCDPKNTRWSYHNGGSWPVLLWLLTAACIKTGRPQIARRAIDLAESRLLKDSWPEYYDGKLGRYVGKQARKYQTWSIAGYLVAKMLLEDPSHLGMISLEEDRQMKPLIKRSSSWTC

SEQ ID NO: 332 - protein, 557 aa, Manihot esculenta
  misc_feature (83)..(550): Pfam name: Invertase_neut Pfam desc: Plant neutral invertase
  misc_feature: Public GI ID no. 74476783
  misc_feature: in Figure 4
  misc_feature: Bit score of 1575.8 for HMM based on sequences of Figure 4
  misc_feature: Functional Homolog Of Ceres Annot ID no. 876994 at SEQ ID NO. 315
MDGTKEMGLRNVSSTCSISEMDDFDLSRLLDKPRLNIERQRSFDERSLSELSIGLTRGGLDIYESTYSPGGRSGFDTPASSTRNSFEPHPMVADAWEALRRSIVYFRGQPVGTIAAIDHASEEVLNYDQVFVRDFVPSALAFLMNGEPEIVKNFLLKTLHLQGWEKRIDRFKLGEGAMPASFKVLHDPIRKTDTLIADFGESAIGRVAPVDSGFWWIILLRAYTKSTGDLSLAETPECQKGMRLILTLCLSEGFDTFPTLLCADGCSMIDRRMGIYGYPIEIQALFFMALRCALSMLKHDTEGKECIERIVKRLHALSYHMRGYFWLDFQQLNDIYRYKTEEYSHTAVNKFNVIPDSIPDWVFDFMPTRGGYFIGNVSPARMDFRWFALGNCVAILSSLATPEQSMAIMDLIESRWEELVGEMPMKIAYPAIESHEWRIVTGCDPKNTRWSYHNGGSWPVLLWMLTAACIKTGRPQIARRAIDLAETRLLKDGWPEYYDGKVGRFIGKQARKYQTWSIAGYLVAKMMLEDPSHLGMISLEEDKQMKPVIKRSTSWTC

SEQ ID NO: 333 - DNA, 1674 bp, Populus balsamifera subsp. trichocarpa
  misc_feature: Ceres Annot ID no. 1486768
  misc_feature: Encodes the peptide sequence at SEQ ID NO. 334
atggatgggactaaagagatgggggggcttaggaacgtgagctcagtgtgttcaatatccgaaatggatgattttgatctctctcgcctccttgacaagccaaagttgaacatagagaggcagagatcgtttgatgagaggtctctaagcgagctctcgatcgggcttgcaagaggaattgatacctttgagaccacatattcacctggtggaaggtcagggtttaacacaccagcctcatcaactcgcaactcgtttgagcctcaccccatggtggctgatgcgtgggaggctctacggaggtctttagtttacttcagaggccaaccggttggtactatagcagcatatgaccatgcctcagaggaggtcttaaactatgaccaggtttttgtacgagattttgtacccagtgccctagcttttctgatgaatggtgagcctgacatagtcaagcacttcctgttgaagacactgtatctccaagggtgggaaaagagaatagatcgattcaaacttggggaaggggcaatgccagcgagctttaaagttctccatgatcctattcggaaaacagactctcttgttgcagattttggtgagagtgctattggaagagttgctccagttgactctggtttctggtggatcattcttcttcgagcatatacgaagtctactggagatttatccctggcagagagaccagagtgtcagaagggaatgaagctcattttgacgctctgcttgtcggaggggtttgatactttccctacccttctttgcgccgatggatgctccatgattgatcgcagaatgggtatctatggttatcctattgagattcaagcactttttttcatggcgttgagaagcgctagctcaatgttgaaacatgatcaagaaggaaacgaatttattgagagaattgtgaaacgtttgcatgccttgagctatcacatgcggagttacttctggcttgactttcaacaactgaatgacatatacagatataagactgaggagtattctcacactgctgtaaataagttcaacgttattcctgattcaatcccagattgggtatttgatttcatgccaattcgtggaggctactttattggcaatgttagtcctgcaaggatggatttcagatggtttgctttaggtaattgcattgccattctgtcttctcttgcaacccatgaacaagcaatggctatcatggatctcattgaagctcgctgggaggagctggtaggagaaatgcctctgaaaatagcctatcctgcgatagaaagtcatgaatggcgaattgtaactggttgtgatcctaagaataccagatggagctatcataatggaggatcatggccagtgcttttatggttgctgactgctgcatgcatcaaaacgggacgaccccaaattgcaagaaaagcgattgatcttgctgagacccgtcttctgaaagacggctggccagaatattatgatgggaaacttggcagatatgttggtaaacaggcaaggaaataccagacatggtcaattgctggatacttggtggcaaagatgatgctggaggacccttcacacttggggatgatttctttggaagaggacaggcaaatgaagcctgtgctcaggagatcatcttcttggacttgctag

SEQ ID NO: 334 - protein, 557 aa, Populus balsamifera subsp. trichocarpa
  misc_feature (83)..(550): Pfam name: Invertase_neut Pfam desc: Plant neutral invertase
  misc_feature: Ceres Annot ID no. 1486768
  misc_feature: in Figure 4
  misc_feature: Bit score of 1551.3 for HMM based on sequences of Figure 4
  misc_feature: Functional Homolog Of Ceres Annot ID no. 876994 at SEQ ID NO. 315
MDGTKEMGGLRNVSSVCSISEMDDFDLSRLLDKPKLNIERQRSFDERSLSELSIGLARGIDTFETTYSPGGRSGFNTPASSTRNSFEPHPMVADAWEALRRSLVYFRGQPVGTIAAYDHASEEVLNYDQVFVRDFVPSALAFLMNGEPDIVKHFLLKTLYLQGWEKRIDRFKLGEGAMPASFKVLHDPIRKTDSLVADFGESAIGRVAPVDSGFWWIILLRAYTKSTGDLSLAERPECQKGMKLILTLCLSEGFDTFPTLLCADGCSMIDRRMGIYGYPIEIQALFFMALRSASSMLKHDQEGNEFIERIVKRLHALSYHMRSYFWLDFQQLNDIYRYKTEEYSHTAVNKFNVIPDSIPDWVFDFMPIRGGYFIGNVSPARMDFRWFALGNCIAILSSLATHEQAMAIMDLIEARWEELVGEMPLKIAYPAIESHEWRIVTGCDPKNTRWSYHNGGSWPVLLWLLTAACIKTGRPQIARKAIDLAETRLLKDGWPEYYDGKLGRYVGKQARKYQTWSIAGYLVAKMMLEDPSHLGMISLEEDRQMKPVLRRSSSWTC

SEQ ID NO: 335 - protein, 558 aa, Coffea arabica
  misc_feature (84)..(551): Pfam name: Invertase_neut Pfam desc: Plant neutral invertase
  misc_feature: Public GI ID no. 112383516
  misc_feature: in Figure 4
  misc_feature: Bit score of 1534.4 for HMM based on sequences of Figure 4
  misc_feature: Functional Homolog Of Ceres Annot ID no. 876994 at SEQ ID NO. 315
MECVREYQLRNVSSHCSISEMDDYDLSKLLDKPDKPRLNIERQRSFDERSLSELSIGLSRALDAYETAYSPGRSALDTPVSSARNSFEPHPMVADAWEALRRSLVFFRDQPVGTIAAYDHASEEVLNYDQVFVRDFVPSALAFLMNGEPEIVKNFLLKTLQLQGWEKRIDRFKLGEGAMPASFKVLHDPDRKTDTIVADFGESAIGRVAPVDSGFWWIILLRAYTKSTGDLSLAETPECQKGMRLILSLCLSEGFDTFPTLLCADGCSMIDRRMGIYGYPIEIQALFFMALRCALVMLRHDTEGKEFIERIVKRLHALSFHMRSYFWLDFQQLNDIYRYKTEEYSHTAVNKFNVIPDSILDWVFDFMPTRGGYFIGNVSPARMDMRWFALGNCVAILSCLATAEQAAAIMDLIEARWDELVGEMPMKICYPAIESHEWRIVTGCDPKNTRWSYHNGGSWPVLLWLLTAACIKTGRIQIARRAIDLAESLLLKDSWPEYYDGKLGRYIGKQARKFQTWSIAGYLVAKMMLEDPSHLGMISLEEDKQMKPLIKRSSSWTC

SEQ ID NO: 336 - protein, 556 aa, Lotus japonicus
  misc_feature (81)..(549): Pfam name: Invertase_neut Pfam desc: Plant neutral invertase
  misc_feature: Public GI ID no. 51587334
  misc_feature: in Figure 4
  misc_feature: Bit score of 1546.2 for HMM based on sequences of Figure 4
  misc_feature: Functional Homolog Of Ceres Annot ID no. 876994 at SEQ ID NO. 315
MDGPVGLKKISSQCSIPEMDDFDQLSRLLDKPRLNIERQRSFDERSLSELSQGFARAGVDNYENYSPGVRSGFNTPASSARNSFEPHPMVADAWESLRRSLVYFKGQPVGTIAAVDHQAEEVLNYDQVFVRDFVPSALAFLMNGEPDIVRNFLLKTLHLQGWEKRIDRFKLGEGVMPASFKVLHDPVRKTDTLIADFGESAIGRVAPVDSGFWWIILLRAYTKSTGDLTLAESPDCQKGMKLILTLCLSEGFDTFPTLLCADGCSMIDRRMGIYGYPIEIQALFFMALRCALSMLKQDDAEGKECVERIVKRLHALSYHMRGYFWLDFQQLNDIYRYKTEEYSHTAVNKFNVIPDSIPEWVFDFMPTRGGYFIGNVSPARMDFRWFALGNCVAILSSLATPEQSMAIMDLIEARWDELVGEMPLKISYPAIESHEWRIVTGCDPKNTRWSYHNGGSWPVLLWLVTAACIKTGRPQIARRAIELAESRLLKDGWPEYYDGKLGRYVGKQARKYQTWSIAGYLVAKMMLEDPSHLGMISLEEDKQMKPVIKRSSSWTC

SEQ ID NO: 337 - DNA, 2230 bp, Glycine max
  misc_feature: Ceres Clone ID no. 535739
  misc_feature: Encodes the peptide sequence at SEQ ID NO. 338
ttctctttctctccatttcgccattctctccgcgcaccgttttccggcgcagtcgccggcgagtcaccgtcgtttccgccggcaagtctctctcaccgttgccatcctccttcagagaagttgagaaaatggacggccatatgggaatgaggaaaatcagctctcactgctctatccctgatttggatgattctgatatcttacgtttgcttgaaaagccaaagttgaacattgagagacagagatcatttgatgagaggtcactcagtgagctctccattggtcttgcgagagcgggcttggataactatgacacttattctccaggaggaagatctggcttcaacacacctgcttcgtctacacggaactcgttcgagcctcaccccatggttgccgatgcctgggaatccctcagaaaatctctagtctattttagaggccaaccggttggcacaattgcagctgttgatcatcaatcagaggaagttctgaactatgatcaggtttttgttcgagattttgtgcccagtgctctagcctttttgatgaatggtgaaccagagatagtcaggaacttcttgttgaagacactgcatcttcagggttgggaaaaaagagtagatcggtttaagcttggtgaaggtgtgatgccagctagtttcaaagttcttcatgatcctattaggaaaacagatactcttattgcagattttggtgaaagtgcaattggaagagttgctccagttgattctggattctggtggataattttacttcgtgcctacacaaagtctacaggggatttatctttggctgaatcaccagattgtcaaaagggaatgaaacttatactgactctatgcttgtcagaggggtttgatacatttccaactttgctttgtgctgatggatgttgcatggttgatcgaagaatgggcatttatggttatccaatagagattcaagcacttttcttcatggcattgagatgtgctttgtcaatgctgaaacaggatgacgccgaaggaaaggaatgcgtagagcgtattgtgaagcgtttgcatgcactaagttatcatatgcggagttacttttggctcgacttccaacaactaaatgacatttatcgatataagaccgaggagtactcacatactgcagtaaataagtttaatgttattcctgattcaatcccagaatgggtgtttgactttatgccaatgcgcgggggctacttcattggaaatgttagtccggcccggatggattttcgatggtttgctttaggaaattgtgttgcaattctatcttctctggcaactccggagcaatcaatggctatcatggatcttattgaatctcgctgggatgaattagttggagaaatgcccctaaaaatatcttatcctgcaatagagagccatgagtggcgaattgttactggttgtgatcccaaaaataccagatggagttaccataatggaggatcttggccagtgctcctgtggctagtaacagctgcttgtatcaaaacggggagaccacagattgcaagacgtgcaattgaacttgccgagagtcgtttactgaaggatgggtggccagagtattatgatggtaaacttgggagatatattggcaaacaggcaagaaaataccaaacatggtctattgcaggttatctggtggcaaagatgatgctggaggacccctcacacttggggatgatttcccttgaagaagacaaacagatgaaaccggttattaaaagatcatcttcttggacttgctaaattcaggtgatagataaatagtataaaaaacgaatagagaaaaacttasaaagtgagagatattgttgtttcaatacacggcactattcttggtgattcccttcctcgtaggcttgattggaagtttggcttgcttgtgtaaaatagctgctgctgagactggcttcatgcttttcccaaataagtaaaaagacacttcagttcatgtttgctaagtttcaatgctaccgtcccacttgttgcgtgggttaattagtaagataagagaaatcatgaaacattcttcattttattattgtgtttccttatagtttatcaataaggcttcttttaaaaagggcctagaacaggaaagtattagctttttcatatgaaactttaggtctactgcccacattgctaaaaaaatatggtaaattatgatttttcttttt

SEQ ID NO: 338 - protein, 555 aa, Glycine max
  misc_feature (80)..(548): Pfam name: Invertase_neut Pfam desc: Plant neutral invertase
  misc_feature: Ceres Clone ID no. 535739
  misc_feature: in Figure 4
  misc_feature: Bit score of 1554.9 for HMM based on sequences of Figure 4
  misc_feature: Functional Homolog Of Ceres Annot ID no. 876994 at SEQ ID NO. 315
MDGHMGMRKISSHCSIPDLDDSDILRLLEKPKLNIERQRSFDERSLSELSIGLARAGLDNYDTYSPGGRSGFNTPASSTRNSFEPHPMVADAWESLRKSLVYFRGQPVGTIAAVDHQSEEVLNYDQVFVRDFVPSALAFLMNGEPEIVRNFLLKTLHLQGWEKRVDRFKLGEGVMPASFKVLHDPIRKTDTLIADFGESAIGRVAPVDSGFWWIILLRAYTKSTGDLSLAESPDCQKGMKLILTLCLSEGFDTFPTLLCADGCCMVDRRMGIYGYPIEIQALFFMALRCALSMLKQDDAEGKECVERIVKRLHALSYHMRSYFWLDFQQLNDIYRYKTEEYSHTAVNKFNVIPDSIPEWVFDFMPMRGGYFIGNVSPARMDFRWFALGNCVAILSSLATPEQSMAIMDLIESRWDELVGEMPLKISYPAIESHEWRIVTGCDPKNTRWSYHNGGSWPVLLWLVTAACIKTGRPQIARRAIELAESRLLKDGWPEYYDGKLGRYIGKQARKYQTWSIAGYLVAKMMLEDPSHLGMISLEEDKQMKPVIKRSSSWTC

SEQ ID NO: 339 - DNA, 2032 bp, Gossypium hirsutum
  misc_feature: Ceres Clone ID no. 1886265
  misc_feature: Encodes the peptide sequence at SEQ ID NO. 340
gttttttcttctctttttttcattttccttccttttctctcctttttgtttttgttttttcctttctccgaccaatttccggccaaatattcagtaattttatctctgttgggcttgcctgagatttcacttctccgacatctttgctttcttaaagacaaagaaaatggatgggactaaagtgatgggacttagaaatgtgagctctatttgttccctctctgaaatggatgatcatgatctctcacgcctccttgataagccgaggcttaacatagagaggcaaagatcatttgatgaaaggtcactcagtgagctccctatgattctcacaagagggagttatgacaattatgagggcatgcactcgccctgcgggaggtcaggtattgatactccggcttcttgggatagaaattcctttgatccgcaccccattgtggctgaagcttgggaagctctcaggaggactttggtgtatttcagaggccaaccagttggtaccattgctgcgtatgatcatgcttccgaggaagttttgaactatgatcaggtttttgttagagattttgtacctagtgctttggcttttctgatgaatggagagcctgaaatagtcaagaactttctcttgaagactctacaacttcaagggtgggagaaaaaagtagataggttcaagctaggagaaggagcaatgccagctagcttcaaagttctacatgaccctgtacgtaaattggacacgattattgctgattttggagagagtgccattggaagagttgctccagttgactctggattctggtggatcattctgctccgtgcatacacaaaatctactggggatttatcactagctgagaggcctgagtgtcaaaaagggatgaggcttatacttactctgtgtttagcagaaggatttgatacatttccaacactgctttgtgctgatggatgctctatgatcgatcgaagaatggatgtttatggttatcctattgaaattcaagcgcttttctatatggctctgaggtgtgcattatcaatgctgaagcaagatgccgaaggaaaagattgcattgaaagaattgagaagcgtttacatgccttgagctatcacatgcgtagttacttttggcttgactttcaacaactaaatgatatttacagatataagactgaggagtactctcacactgcagtaaataagtttaatgttattcccgattctatccctgactggatatttgattttatgccaacacgtggtggctactttattgggaatgttagtcctgcaaggatggatttccgatggttttgtttaggtaactgtatagcaattttatcttctcttgcaacaccagagcaatcagtggctattatggatcttattgaagcccgttgggatgaacttgttggagaaatgcctttaaaaatagcttatcctgcaatagaaaaacatgaatggcgaattgtcaccggttgtgaccctaagaacacaagatggagttatcacaatggaggatcttggccagtgcttttgtggttgctaacagctgcttgcatcaaaacgggaaggccacaaattgcaaggcaggcaattgatcttgcggagacacgtttgttgaaagatggctggccagaatattatgacggaaaactcgggagatttatcggcaaacaagcaaggaagtaccagacatggtcaatagctggatatttagtggcgaaaatgatgctagaggatccatcacacttggggatgatcgctttggaagaggacaaacagaggaagccaatgataaagagatcatcttcctggaattgctaaacactctaaactaacaaaacaaaacgtggatgagtagaggggacaaaacagacggaaggtaagaggaccttcaaatttcattataacactattctttggcatttgcctatttagggtatgatcaaaagttggattttttgtgtatagtagctggtttttctttacatttataataaaatgatacattatgct

SEQ ID NO: 340 - protein, 557 aa, Gossypium hirsutum
  misc_feature (83)..(550): Pfam name: Invertase_neut Pfam desc: Plant neutral invertase
  misc_feature: Ceres Clone ID no. 1886265
  misc_feature: in Figure 4
  misc_feature: Bit score of 1551.7 for HMM based on sequences of Figure 4
  misc_feature: Functional Homolog Of Ceres Annot ID no. 876994 at SEQ ID NO. 315
MDGTKVMGLRNVSSICSLSEMDDHDLSRLLDKPRLNIERQRSFDERSLSELPMILTRGSYDNYEGMHSPCGRSGIDTPASWDRNSFDPHPIVAEAWEALRRTLVYFRGQPVGTIAAYDHASEEVLNYDQVFVRDFVPSALAFLMNGEPEIVKNFLLKTLQLQGWEKKVDRFKLGEGAMPASFKVLHDPVRKLDTIIADFGESAIGRVAPVDSGFWWIILLRAYTKSTGDLSLAERPECQKGMRLILTLCLAEGFDTFPTLLCADGCSMIDRRMDVYGYPIEIQALFYMALRCALSMLKQDAEGKDCIERIEKRLHALSYHMRSYFWLDFQQLNDIYRYKTEEYSHTAVNKFNVIPDSIPDWIFDFMPTRGGYFIGNVSPARMDFRWFCLGNCIAILSSLATPEQSVAIMDLIEARWDELVGEMPLKIAYPAIEKHEWRIVTGCDPKNTRWSYHNGGSWPVLLWLLTAACIKTGRPQIARQAIDLAETRLLKDGWPEYYDGKLGRFIGKQARKYQTWSIAGYLVAKMMLEDPSHLGMIALEEDKQRKPMIKRSSSWNC

SEQ ID NO: 341 - protein, 562 aa, Oryza sativa subsp. japonica
  misc_feature (88)..(555): Pfam name: Invertase_neut Pfam desc: Plant neutral invertase
  misc_feature: Public GI ID no. 115446631
  misc_feature: in Figure 4
  misc_feature: Bit score of 1525.2 for HMM based on sequences of Figure 4
  misc_feature: Functional Homolog Of Ceres Annot ID no. 876994 at SEQ ID NO. 315
MELAVGAGGMRRSASHTSLSESDDFDLSRLLNKPRINVERQRSFDDRSLSDVSYSGGGHGGTRGGFDGMYSPGGGLRSLVGTPASSALHSFEPHPIVGDAWEALRRSLVFFRGQPLGTIAAFDHASEEVLNYDQVFVRDFVPSALAFLMNGEPEIVRHFLLKTLLLQGWEKKVDRFKLGEGAMPASFKVLHDSKKGVDTLHADFGESAIGRVAPVDSGFWWIILLRAYTKSTGDLTLAETPECQKGMRLILSLCLSEGFDTFPTLLCADGCCMIDRRMGVYGYPIEIQALFFMALRCALQLLKHDNEGKEFVERIATRLHALSYHMRSYYWLDFQQLNDIYRYKTEEYSHTAVNKFNVIPDSIPDWLFDFMPCQGGFFIGNVSPARMDFRWFALGNMIAILSSLATPEQSTAIMDLIEERWEELIGEMPLKICYPAIENHEWRIVTGCDPKNTRWSYHNGGSWPVLLWLLTAACIKTGRPQIARRAIDLAERRLLKDGWPEYYDGKLGRYVGKQARKFQTWSIAGYLVAKMMLEDPSHLGMISLEEDKAMKPVLKRSASWTN

SEQ ID NO: 342 - DNA, 1656 bp, Sorghum bicolor
  misc_feature: Ceres Annot ID no. 6119623
  misc_feature: Encodes the peptide sequence at SEQ ID NO. 343
atggagctggctgtcggcggcgggatgcggcggtcggcgtcgcacacctcgctgtcggagtcggacgacttcgagctcacgcggctgctcagcaagccgcggatcaacgtcgagcgccagcgctccttcgacgaccgctcgctcagcgacgtctcgcactcgggcggctacggcaggggaggcttcgacggcatgtactcgcctgggggcggcctgcgctccctcgtcggcacgccggcatcctccgcgctgcactccttcgagccccaccccatcgtcggcgacgcatgggaggcgctccgccgctcactcgtcttctttcgcggccagccccttggcaccgtcgccgccgtcgaccacgcttccgaggaagtcctcaactacgaccaagtgtttgtgagggatttcgtgccgagcgcgctggcgtttctgatgaatggcgagccggatatcgtcaagaacttccttctgaagaccctgctgctgcagggctgggagaagaaagtcgaccggttcaagcttggggagggagccatgccggctagcttcaaggtgatgcatgacgccaagaagggggtcgagaccctacatgctgattttggagagagcgccattgggagggttgcgcctgtggattctggtttctggtggatcatactcctccgggcgtacacaaaaaccaccggtgatatgaccctggcagagacaccggagtgccagaaagggatgaggctcatactcagcctgtgcttatctgaggggtttgataccttcccgacattgttatgtgctgatggttgctgtatgatagatcgcagaatgggtgtatatggataccctattgagattcaagcccttttctttatggcactaaggtgtgctcttcaaatgcttaagcatgataatgaagggaaggaatttgtagagaagattgctacccgccttcatgctttaagttatcacatgcgaagttatttttggctcgatttccaacagctaaatgacatttatcgttacaagacagaagaatattcccacacagccgtcaacaaattcaatgttattcctgattcaattccggactggctatttgactttatgccttgtcagggtgggtttttcattggtaatgttagtcctgccaggatggacttccgatggtttgcacttggaaacatgattgctatactttcttctcttgcaacacctgagcaatctgttgctataatggatcttattgaggagcgttgggaagagcttatcggtgatatgcctctgaagatatgttatcctgctattgagaaccatgaatggcgaattgtgacaggctgtgatccaaaaaatactagatggagctatcacaatggaggatcgtggccagcctgcatcaaaactggacggccgcaaattgcaagaagagcaattgacctagcagagaggaggctgttgaaggatggctggcctgagtactatgacgggaagcttggtcggtatgttggcaagcaggcaaggaaattccagacttggtccatcgcggggtatttggtcgccaagatgatgttggaagatccttcacatcttggcatgatctccctagaagaggataaggcgatgttgaagcctgttttgaagcggtccgcatcatggacaaactaa

SEQ ID NO: 343 - protein, 551 aa, Sorghum bicolor
  misc_feature (84)..(544): Pfam name: Invertase_neut Pfam desc: Plant neutral invertase
  misc_feature: Ceres Annot ID no. 6119623
  misc_feature: in Figure 4
  misc_feature: Bit score of 1483.4 for HMM based on sequences of Figure 4
  misc_feature: Functional Homolog Of Ceres Annot ID no. 876994 at SEQ ID NO. 315
MELAVGGGMRRSASHTSLSESDDFELTRLLSKPRINVERQRSFDDRSLSDVSHSGGYGRGGFDGMYSPGGGLRSLVGTPASSALHSFEPHPIVGDAWEALRRSLVFFRGQPLGTVAAVDHASEEVLNYDQVFVRDFVPSALAFLMNGEPDIVKNFLLKTLLLQGWEKKVDRFKLGEGAMPASFKVMHDAKKGVETLHADFGESAIGRVAPVDSGFWWIILLRAYTKTTGDMTLAETPECQKGMRLILSLCLSEGFDTFPTLLCADGCCMIDRRMGVYGYPIEIQALFFMALRCALQMLKHDNEGKEFVEKIATRLHALSYHMRSYFWLDFQQLNDIYRYKTEEYSHTAVNKFNVIPDSIPDWLFDFMPCQGGFFIGNVSPARMDFRWFALGNMIAILSSLATPEQSVAIMDLIEERWEELIGDMPLKICYPAIENHEWRIVTGCDPKNTRWSYHNGGSWPACIKTGRPQIARRAIDLAERRLLKDGWPEYYDGKLGRYVGKQARKFQTWSIAGYLVAKMMLEDPSHLGMISLEEDKAMLKPVLKRSASWTN

SEQ ID NO: 344 - DNA, 2108 bp, Zea mays
  misc_feature: Ceres Clone ID no. 1580417
  misc_feature: Encodes the peptide sequence at SEQ ID NO. 345
gcgcccgagcagagagagcctgactctgcagctatacgagctcagaccctctcctccctcctttctcttaccttcctcgtgagacatcaccgccgtctcggtacgtggcagcaaccaaccgttcgcttctctctcctggagcgtcgcgcggggcccggcgggggaccgtacgtacctgtgcgcgaagacggggaccgtggcggagttcgagatggaggcggcgccgatgcgaaaggcgtcgtcgcaggcgtcgctggcggacccagacgacttcgacctgacgcgcctgctgaaccacaagccgcggatcaacgtggacaggcagcggtcgttcgacgaccgctccctcggcgagatatcgctcgccggcgcgggcacggccagccgcggtggctggggctacggcggcggggggatggagagctacgagagcatgtactcccccggcggcgggctgcggtcctactgcggcacgccggcctcgtccacgcggctctcgttcgagccccacccgctcatcggcgaggcctgggacgcgctgcgccgctccatggtgtccttccgcggccagccgctcggcaccatcgccgccgtcgaccactcctccggcgaagtgctcaactacgaccaggtgttcgttagggacttcgtcccgagcgcgttggcgttcctgatgaacggggagccggagatcgttcggaacttcctgctgaagacgctgctgctgcaggggtgggagaagcggatcgaccgcttcaagctcggcgagggcgccatgccggcgagcttcaaggtgctcaaggacccgaagcgtggcgtcgacaagctggtggccgacttcggggagagcgccatcggccgcgtggcgccggtggattccgggttctggtggatcatcatcctgagggcctacaccaaatccaccggcgacatgaccctcgccgagacgcccatgtgccagaagggcatccggctcatcatgaaccagtgcctcgccgagggcttcgacaccttccccaccctgctctgcgccgacggctgctgcatgatcgatcgcaggatgggtgtgtatgggtacccgatcgagatccaggccctgttcttcatggcgctgcggtgcgcgctcctcatgctgaagccggacgcggaggggaaggagatcatggagcggatcgtgacgcggctgacggcgctgagctaccacatgcggagctacttctggctggacttccagcagctcaacgacatctacaggttcaagacggaggagtactcgcacacggccgtcaacaagttcaacgtgaacccggagtccatcccggactggctcttcgacttcatgcccacccgcggcggctacttcgtcggcaacgtcagccccgcccggatggacttccgctggttcgcgctcggcaactgcgtcgccatcctcgcctcgctcgccacgcccgaccaggccgccgccatcatggacctcatcgaggagcgctgggaggacctcgtcggcgaaatgcccgtcaagatatgctacccggccatcgaggggcacgagtggcagatagtcacgggctgcgaccccaagaacacaagatggagctaccacaacgggggatcttggccagtgctgctgtggctgctcaccgcggcatgcatcaagaccgggaggctgaagatcgctcggcgcgcgatcgacctagccgaggcgaggctcgcgagggacggctggccagagtactacgacggcaagctgggtcgctacatcggcaagcaggcgaggaagctccagacgtggtccatcgcggggtacctagtggccaagatgatggtggaggatccgtcccacctcggcatgatctccctggaggaggagaagccgaccaagccggtgctcaggaggtcggcctcttggacagggtaaggtagtggcgggctggcggccacaaagacggcagcaggacccgagttctggttctttgagctaacatctcgaatttctctgcaacttcttgctttccggctggggaagtaggcgtgtccaatgttttggtgggtctcccatgtatgaatctttctctatatgatatataagtcccgtcggcgaaataagg

SEQ ID NO: 345 - protein, 568 aa, Zea mays
  misc_feature (94)..(561): Pfam name: Invertase_neut Pfam desc: Plant neutral invertase
  misc_feature: Ceres Clone ID no. 1580417
  misc_feature: in Figure 4
  misc_feature: Bit score of 1474.6 for HMM based on sequences of Figure 4
  misc_feature: Functional Homolog Of Ceres Annot ID no. 876994 at SEQ ID NO. 315
MEAAPMRKASSQASLADPDDFDLTRLLNHKPRINVDRQRSFDDRSLGEISLAGAGTASRGGWGYGGGGMESYESMYSPGGGLRSYCGTPASSTRLSFEPHPLIGEAWDALRRSMVSFRGQPLGTIAAVDHSSGEVLNYDQVFVRDFVPSALAFLMNGEPEIVRNFLLKTLLLQGWEKRIDRFKLGEGAMPASFKVLKDPKRGVDKLVADFGESAIGRVAPVDSGFWWIIILRAYTKSTGDMTLAETPMCQKGIRLIMNQCLAEGFDTFPTLLCADGCCMIDRRMGVYGYPIEIQALFFMALRCALLMLKPDAEGKEIMERIVTRLTALSYHMRSYFWLDFQQLNDIYRFKTEEYSHTAVNKFNVNPESIPDWLFDFMPTRGGYFVGNVSPARMDFRWFALGNCVAILASLATPDQAAAIMDLIEERWEDLVGEMPVKICYPAIEGHEWQIVTGCDPKNTRWSYHNGGSWPVLLWLLTAACIKTGRLKIARRAIDLAEARLARDGWPEYYDGKLGRYIGKQARKLQTWSIAGYLVAKMMVEDPSHLGMISLEEEKPTKPVLRRSASWTG

SEQ ID NO: 346 - protein, 570 aa, Solanum lycopersicum
  misc_feature (97)..(563): Pfam name: Invertase_neut Pfam desc: Plant neutral invertase
  misc_feature: Public GI ID no. 146395463
  misc_feature: in Figure 4
  misc_feature: Bit score of 1473.7 for HMM based on sequences of Figure 4
  misc_feature: Functional Homolog Of Ceres Annot ID no. 876994 at SEQ ID NO. 315
MPSPVDVSQNGNARHAEAAPSLFEIEEDLARLLERPRQVNIERKRSFDERSFSEMSMTHSPPRQVYKNSENSSRVFDNMVGVYSPGRWSGIHTPRSTFGYEPHPIIGEAWEALRRSIVNFRDQPVGTIAAIDNSAEELNYDQVFVRDFVPSALAFLMNGEPDIVKNFLLKTLRLQSREKKIDQFKLGDGVMPASFKVSHDPVRNYETITADFGESAIGRVAPVDSGFWWIILLHAYTKSTGDTSLAEMPECQRGIRLILGLCLSEGFDTFPTLLCADGCSMIDRRMGVYGYPIEIQALFFMALRCALFLLKHDEENQECCDAIIKRLHALSFHMRSYYWLDIKQLNDIYRYKTEEYSHTAVNKFNVMPDSLPEWVFDFMPTRGGYFIGNVSPAHMDFRWFCLGNCISILSSLATPEQASAIMDLVGSRWQELVGEMPLKICYPAMEGHEWRIVTGCDPKNTSRSYHNGGTWPVLLWLLTAAAIKTGRPQIARRAIELAESRLLKDSWPEYYDGKLGRFIGKQARKFQTWSIAGYLVARMMLEDPSHLGMISLEEDKQMKPTMKRSASWTC

SEQ ID NO: 347 - protein, 552 aa, Triticum aestivum
  misc_feature (78)..(545): Pfam name: Invertase_neut Pfam desc: Plant neutral invertase
  misc_feature: Public GI ID no. 152955872
  misc_feature: in Figure 4
  misc_feature: Bit score of 1458.8 for HMM based on sequences of Figure 4
  misc_feature: Functional Homolog Of Ceres Annot ID no. 876994 at SEQ ID NO. 315
MKRVSSHVSIASEAEINLDLSRLLIDKPRFTLERKRSFDEQSWSDLSHRHNDGFDSVANSPAFRTGFESPFSTGAHFGEPSGPHPLVNEAWEALRKSVVHFRGQPVGTVAAVDHASEEVLNYDQVFVRDFVPSALAFLMNNEPEIVKNFLLRTLHLQSSEKMVDRFKLGAGAMPASFKVDRNVNRNTETLVADFGESAIGRVAPVDSGFWWIILLRAYTKYTGDASLSESPDCQKCMRLILNLCLSEGFDTFPTLLCTDGCSMIDRRMGIYGYPIEIQALFYMALRCALQMLKPDGEGKDFIEKIGQRLHALTYHMRNYFWLDFPHLNNIYRYKTEEYSHTAVNKFNVIPDSIPDWVFDFMPCRGGYFLGNVSPAMMDFRWFALGNCIAIISSLATPEQSSAIMDLIEERWDELVGEVPLKIVYPALENHEWRIITGCDPKNTRWSYHNGGSWPVLLWLLTAACIKTGRPQMAKRAIELSEARLLKDGWPEYYDGKLGKFVGKQARKFQTWSIAGYLVARMMLEDPSTLMMISMEEDRPVKPTMRRSASWNA

SEQ ID NO: 348 - DNA, 2446 bp, Panicum virgatum
  misc_feature: Ceres Clone ID no. 1883376
  misc_feature: Encodes the peptide sequence at SEQ ID NO. 349
attacgctttcttccgctgcctctctccaccaaacccagaagaaaccagcctttgcagtttcgcggatcggccctcgccgaccacttatttgtcaaaagttgccgcttgcctgtattgtccctttccgcgtagccccctgaaagtttccccgcctcgcacacgggcccttcgccggagcttgccatatgaatggtcaaaccccgatggggctcgccgccgccgcagccgcagcagtgaggccctgccgccgccgcctcctctcgtccgcctccgtggcggcgtcaaagacgggggcgggcaccgcgacgccgctcttccccagattgccccacccgccgtatgggcggcgcctccccttcctcgtctccgcggcgtcacagaccggcccggacgccccgccaacccacaccacgggccccgtcccctccgacccccgcgccgccgtttccggcaacctccccttcttcgaccgcgtcctcttcccggactcgttcccgatcgagaccccgcccgccaaggaggacgaggacgcggcggcggcatcggcgccggcgcaggccgatgaggccgtggcgccggcgccgcccgtgagggaggagacggaggctgagagggaggcctggaggctgctgcggagggcggtcgtctgctactgcggcgagccagtggggacggtggcggcggaggaccccgagtccacggagacgctcaactacgatcaggtcttcatcagggatttcgtgccctccgcgctcgccttcctcatgcgcggcgagaccgagatcgtccgcaacttccttctccacaccctccagcttcagagctgggagaaaactgttgactgttacagccctgggcaaggattgatgccagccagcttcaagattaggaccgtaccacttgatgagaacaatgaaggatttgaggaagtcttggaccctgattttggtgaggcagctatcggccgggtagctcctgtggattctggactgtggtggattattttgctgagagcttactgcaagattacaggggactatgatttgctagaaagagttgatgtgcagacaggaattcaactgatactgagtttgtgtttgtctgatgggttcgacatgttcccaactttactagttacagatggatcatgcatgatagacaggaggatgggaatacatggacatcctcttgaaatccaagctttgttctactctgctttacgatgctcacgagaaatgcttgttgtgaatgatgggtcaaaaaacctcatccgtgctgttaacaacaggctcagtgcattgtcctttcacataagagaatattactgggttgacatgaagaagataaatgagatatacagatacaagacagaagaatactcccatgacgcaactaacaaattcaacatttacccggagcaaataccttcctggcttgttgactggattcctgagaaaggaggttaccttattgggaatctgcagccagctcacatggattttaggttcttctctcttggcaacctttgggccatagcttcttctctaactactccaagacaagctgagggaattcttagccttattgaagaaaagtgggatgatcttgtagcaaatatgcccctcaagatatgctatcctgcaatggaagatgatgagtggcgcattattactggcagtgatccaaaaaacaccccatggtcatatcataatggtggatcttggccaaccctgttgtggcagttcacattggcgtgcataaaaatggggagaccagaattggcccggagggctgttgctctggctgaggagaggctctcagacgacaagtggccggaatactacgacacccggtctgggaggttcatcgggaaacagtcacgatcttatcagacatggacaattgctggttttctgacctcaaagatgttgcttgagaacccagagctggcttctattctgacctgcgatgaggaccttgagctgctcgaaggctgtgcttgctgcctgtccaagaagagggctaggtgctcacgccgtgcggccaagtcacatgctgggtaaaactgcaaagcacatgctgttcgttctacagggatgcaccatgtatactacccgttctaggattaaccccgagatggagagactcttcacatgtacattagtataggtttatgttagatacccatccattcatttcctcagtggctactcattctttttttctgagctgccattgatgggaaataccctggctgacaccggtggtcgaaagaagagagcaaaacatatccagagtttgtgctctcatgtacacagaaaaaggaaatttgttcctgttattcgatccgcaagctgctcccttttgttgggagtgctgtcgaagccctaaccattgtatttcttgtcagtactaaaaatagtgtgctgtatcgcttggaaactc

SEQ ID NO: 349 - protein, 625 aa, Panicum virgatum
  misc_feature (133)..(605): Pfam name: Invertase_neut Pfam desc: Plant neutral invertase
  misc_feature (187)..(578): Pfam name: GDE_C Pfam desc: Amylo-alpha-1,6-glucosidase
  misc_feature: Ceres Clone ID no. 1883376
  misc_feature: in Figure 4
  misc_feature: Bit score of 1364.1 for HMM based on sequences of Figure 4
  misc_feature: Functional Homolog Of Ceres Annot ID no. 876994 at SEQ ID NO. 315
MNGQTPMGLAAAAAAAVRPCRRRLLSSASVAASKTGAGTATPLFPRLPHPPYGRRLPFLVSAASQTGPDAPPTHTTGPVPSDPRAAVSGNLPFFDRVLFPDSFPIETPPAKEDEDAAAASAPAQADEAVAPAPPVREETEAEREAWRLLRRAVVCYCGEPVGTVAAEDPESTETLNYDQVFIRDFVPSALAFLMRGETEIVRNFLLHTLQLQSWEKTVDCYSPGQGLMPASFKIRTVPLDENNEGFEEVLDPDFGEAAIGRVAPVDSGLWWIILLRAYCKITGDYDLLERVDVQTGIQLILSLCLSDGFDMFPTLLVTDGSCMIDRRMGIHGHPLEIQALFYSALRCSREMLVVNDGSKNLIRAVNNRLSALSFHIREYYWVDMKKINEIYRYKTEEYSHDATNKFNIYPEQIPSWLVDWIPEKGGYLIGNLQPAHMDFRFFSLGNLWAIASSLTTPRQAEGILSLIEEKWDDLVANMPLKICYPAMEDDEWRIITGSDPKNTPWSYHNGGSWPTLLWQFTLACIKMGRPELARRAVALAEERLSDDKWPEYYDTRSGRFIGKQSRSYQTWTIAGFLTSKMLLENPELASILTCDEDLELLEGCACCLSKKRARCSRRAAKSHAG

SEQ ID NO: 350 - protein, 617 aa, Beta vulgaris
  misc_feature (123)..(595): Pfam name: Invertase_neut Pfam desc: Plant neutral invertase
  misc_feature: Public GI ID no. 21322510
  misc_feature: in Figure 4
  misc_feature: Bit score of 1346.6 for HMM based on sequences of Figure 4
  misc_feature: Functional Homolog Of Ceres Annot ID no. 876994 at SEQ ID NO. 315
MTTAEALLSGSALWNPTFQSDIFLKPKLTHSGVFSCTKRLKGLRGKRNKWEIDCRRKIYPVPPCRTRVKRPGCLSSDGLNGPLFSGESEKLNPSSADVNAKPHVSELIASEKLAAAAAKSEKALRVKADSLEDEAWELLNESIVNYCGSPVGTIAANDPTSTSILNYDQVFIRDFVPSAIAFLLKDDYDIVRNFLLNTLQLQSWEKTMDCHSPGQGLMPASFKVRTVPLDGDDSATEEVLDPDFGEAAIGRVAPVDSGLWWIILLRAYGKCSGDLSLQERVDVQTGMKMILKLCLADGFDMFPTLLVTDGSCMIDRRMGIHGHPLEIQALFHSALRCAREMLTPEDGSADLIRALNSRLLALSFHIREYYWLDMRKLNEIYRYKTEEYSFDAVNKFNIYPDQIPPWLVDWMPEKGGYLIGNLQPAHMDFRFFSLGNFWSIVSSLATSGQSHAILDLFEAKWVDLVADMPIKICYPALEDQEWRIVTGGDPKNTPWSYHNAGSWPTLLWQLTVACIKMNRPEIAEKAVKVAERRISKDRWPEYYDTKGARFIGKQSHLFQTWSIAGYLVAKLLLANPEKAKILINEEDSELVNAFSSLIPRGRKRSRKGVGAKQSYII

SEQ ID NO: 351 - protein, 675 aa, Daucus carota
  misc_feature (182)..(654): Pfam name: Invertase_neut Pfam desc: Plant neutral invertase
  misc_feature: Public GI ID no. 4200165
  misc_feature: in Figure 4
  misc_feature: Bit score of 1359.6 for HMM based on sequences of Figure 4
  misc_feature: Functional Homolog Of Ceres Annot ID no. 876994 at SEQ ID NO. 315
MNTTCIAVSNMRPCCRMLLSCKNSSIFGYSFRKCDHRMGTNLSKKQFKVYGLRGYVSCRGGKGLGYRCGIDPNRKGFFGSGSDWGQPRVLTSGCRRVDSGGRSVLVNVASDYRNHSTSVEGHVNDKSFERIYVRGGLNVKPLVIERVEKGEKVREEEGRVGVNGSNVNIGDSKGLNGGKVLSPKREVSEVEKEAWELLRGAVVDYCGNPVGTVAASDPADSTPLNYDQVFIRDFVPSALAFLLNGEGEIVKNFLLHTLQLQSWEKTVDCHSPGQGLMPASFKVKNVAIDGKIGESEDILDPDFGESAIGRVAPVDSGLWWIILLRAYTKLTGDYGLQARVDVQTGIRLILNLCLTDGFDMFPTLLVTDGSCMIDRRMGIHGHPLEIQALFYSALRCSREMLIVNDSTKNLVAAVNNRLSALSFHIREYYWVDMKKINEIYRYKTEEYSTDAINKFNIYPDQIPSWLVDWMPETGGYLIGNLQPAHMDFRFFTLGNLWSIVSSLGTPKQNESILNLIEDKWDDLVAHMPLKICYPALEYEEWRVITGSDPKNTPWSYHNGGSWPTLLWQFTLACIKMKKPELARKAVALAEKKLSEDHWPEYYDTRRGRFIGKQSRLYQTWTIAGFLTSKLLLENPEMASKLFWEEDYELLESCVCAIGKSGRKKCSRFAAKSQVV

SEQ ID NO: 352 - protein, 494 aa, Arabidopsis thaliana
  misc_feature (21)..(488): Pfam name: Invertase_neut Pfam desc: Plant neutral invertase
  misc_feature: Ceres Peptide ID no. 1010103
  misc_feature: Bit score of 1331.0 for HMM based on sequences of Figure 4
  misc_feature: Functional Homolog Of Ceres Annot ID no. 876994 at SEQ ID NO. 315
MGIFDNVNSPGGWETPVSSARNSFEPHPMVAEAWDALRRSLVYFRGQPVGTIAAYDHATEEVLNYDQVFVRDFVPSALAFLMNGEPDIVKNFLLKTIQIQGREKRIDRFKLGEGAMPASFKVIHDPIKETDSINADFGESAIGRVAPVDSGFWWIILLRAYTKSTGDTSLAETSECQKGMRLILSLCLSEGFDTFPTLLCADGCSMIDRRMGVYGYPIEIQALFFMALRSAMSMLKHDAEGKEFMERIVKRLHALSFHMRSYFWLDFQQLNDIYRYKTEEYSHTAVNKFNVIPDSIPEWVFDFMPLRGGYFIGNVSPARMDFRWFALGNCVAILASLATPEQSASIMDLIEERWEELVGAMPVKICHPAIESHEWRIVTGCDPKNTRWSYHNGGSWPVLLWLLTAACIKTGRPQIARRAIDLAEARLLKDGWPEYYDGKSGRFIGKQARKFQTWSIAGYLVAKMLLEDPSHLGMISLEEDKQTKPVIKRSYSWT

SEQ ID NO: 353 - protein, 466 aa, Arabidopsis thaliana
  misc_feature (1)..(460): Pfam name: Invertase_neut Pfam desc: Plant neutral invertase
  misc_feature: Ceres Peptide ID no. 1010104
  misc_feature: Bit score of 1249.9 for HMM based on sequences of Figure 4
  misc_feature: Functional Homolog Of Ceres Annot ID no. 876994 at SEQ ID NO. 315
MVAEAWDALRRSLVYFRGQPVGTIAAYDHATEEVLNYDQVFVRDFVPSALAFLMNGEPDIVKNFLLKTIQIQGREKRIDRFKLGEGAMPASFKVIHDPIKETDSINADFGESAIGRVAPVDSGFWWIILLRAYTKSTGDTSLAETSECQKGMRLILSLCLSEGFDTFPTLLCADGCSMIDRRMGVYGYPIEIQALFFMALRSAMSMLKHDAEGKEFMERIVKRLHALSFHMRSYFWLDFQQLNDIYRYKTEEYSHTAVNKFNVIPDSIPEWVFDFMPLRGGYFIGNVSPARMDFRWFALGNCVAILASLATPEQSASIMDLIEERWEELVGAMPVKICHPAIESHEWRIVTGCDPKNTRWSYHNGGSWPVLLWLLTAACIKTGRPQIARRAIDLAEARLLKDGWPEYYDGKSGRFIGKQARKFQTWSIAGYLVAKMLLEDPSHLGMISLEEDKQTKPVIKRSYSWT

SEQ ID NO: 354 - protein, 467 aa, Arabidopsis thaliana
  misc_feature (1)..(460): Pfam name: Invertase_neut Pfam desc: Plant neutral invertase
  misc_feature: Ceres Peptide ID no. 1498987
  misc_feature: Bit score of 1292.6 for HMM based on sequences of Figure 4
  misc_feature: Functional Homolog Of Ceres Annot ID no. 876994 at SEQ ID NO. 315
MVAEAWEALRRSMVFFRGQPVGTIAAYDHASEEVLNYDQVFVRDFVPSALAFLMNGEPDIVKNFLLKTLQLQGWEKRVDRFKLGEGVMPASFKVLHDPVRKTDTIIADFGESAIGRVAPVDSGFWWIILLRAYTKSTGDLTLSETPECQRGMRLILSLCLSEGFDTFPTLLCADGCSMVDRRMGVYGYPIEIQALFFMALRCALSMLKPDEEGRDFIERIVKRLHALSFHMRSYFWLDFQQLNDIYRYKTEEYSHTAVNKFNVMPDSIPDWVFDFMPLRGGYFVGNVSPARMDFRWFSLGNCVSILSSLATPDQSMAIMDLLEHRWEELVGEMPLKICYPCIESHEWRIVTGCDPKNTRWSYHNGGSWPVLLWTLTEACIKTGRPQIARRAIDLIESRLHRDCWPEYYDGKQGRYVGKQARKYQTWSIAGYLVAKMMLEDPSHIGMISLEEDKQMKPVIKRSASWTC

SEQ ID NO: 355 - protein, 455 aa, Arabidopsis thaliana
  misc_feature (1)..(448): Pfam name: Invertase_neut Pfam desc: Plant neutral invertase
  misc_feature: Ceres Peptide ID no. 1498988
  misc_feature: Bit score of 1244.3 for HMM based on sequences of Figure 4
  misc_feature: Functional Homolog Of Ceres Annot ID no. 876994 at SEQ ID NO. 315
MVFFRGQPVGTIAAYDHASEEVLNYDQVFVRDFVPSALAFLMNGEPDIVKNFLLKTLQLQGWEKRVDRFKLGEGVMPASFKVLHDPVRKTDTIIADFGESAIGRVAPVDSGFWWIILLRAYTKSTGDLTLSETPECQRGMRLILSLCLSEGFDTFPTLLCADGCSMVDRRMGVYGYPIEIQALFFMALRCALSMLKPDEEGRDFIERIVKRLHALSFHMRSYFWLDFQQLNDIYRYKTEEYSHTAVNKFNVMPDSIPDWVFDFMPLRGGYFVGNVSPARMDFRWFSLGNCVSILSSLATPDQSMAIMDLLEHRWEELVGEMPLKICYPCIESHEWRIVTGCDPKNTRWSYHNGGSWPVLLWTLTEACIKTGRPQIARRAIDLIESRLHRDCWPEYYDGKQGRYVGKQARKYQTWSIAGYLVAKMMLEDPSHIGMISLEEDKQMKPVIKRSASWTC

SEQ ID NO: 356 - protein, 406 aa, Arabidopsis thaliana
  misc_feature (1)..(400): Pfam name: Invertase_neut Pfam desc: Plant neutral invertase
  misc_feature: Ceres Peptide ID no. 1809802
  misc_feature: Bit score of 989.0 for HMM based on sequences of Figure 4
  misc_feature: Functional Homolog Of Ceres Annot ID no. 876994 at SEQ ID NO. 315
MNGEPDIVKNFLLKTIQIQGREKRIDRFKLGEGAMPASFKVIHDPIKETDSINADFGESAIGRVAPVDSGFWWIILLRAYTKSTGDTSLAETSECQKGMRLILSLCLSEGFDTFPTLLCADGCSMIDRRMGVYGYPIEIQALFFMALRSAMSMLKHDAEGKEFMERIVKRLHALSFHMRSYFWLDFQQLNDIYRYKTEEYSHTAVNKFNVIPDSIPEWVFDFMPLRGGYFIGNVSPARMDFRWFALGNCVAILASLATPEQSASIMDLIEERWEELVGEMPVKICHPAIESHEWRIVTGCDPKNTRWSYHNGGSWPAACIKTGRPQIARRAIDLAEARLLKDGWPEYYDGKSGRFIGKQARKFQTWSIAGYLVAKMLLEDPSHLGMISLEEDKQTKPVIKRSYSWT

SEQ ID NO: 357 - protein, 566 aa, Arabidopsis thaliana
  misc_feature (84)..(559): Pfam name: Invertase_neut Pfam desc: Plant neutral invertase
  misc_feature: Public GI ID no. 7267646
  misc_feature: Bit score of 1509.5 for HMM based on sequences of Figure 4
  misc_feature: Functional Homolog Of Ceres Annot ID no. 876994 at SEQ ID NO. 315
MEEGHKEPLVLRVEGSHCSLSEMDDFDLTRALEKPRQLKIERKRSFDERSMSELSTGYVRQDSILEMAHSPGSRSMVDTPLSVRNSFEPHPMVAEAWEALRRSMVFFRGQPVGTIAAYDHASEEVLNYDQVFVRDFVPSALAFLMNGEPDIVKNFLLKTLQLQGWEKRVDRFKLGEGVMPASFKVLHDPVRKTDTIIADFGESAIGRVAPVDSGFWWIILLRAYTKSTGDLTLSETPECQRGMRLILSLCLSEGFDTFPTLLCADGCSMVDRRMGVYGYPIEIQALFFMALRCALSMLKPDEEGRDFIERIVKRLHALSFHMRSYFWLDFQQLNDIYRLIVKLLLRYKTEEYSHTAVNKFNVMPDSIPDWVFDFMPLRGGYFVGNVSPARMDFRWFSLGNCVSILSSLATPDQSMAIMDLLEHRWEELVGEMPLKICYPCIESHEWRIVTGCDPKNTRWSYHNGGSWPVLLWTLTAACIKTGRPQIARRAIDLIESRLHRDCWPEYYDGKQGRYVGKQARKYQTWSIAGYLVAKMMLEDPSHIGMISLEEDKQMKPVIKRSASWTC

SEQ ID NO: 358 - DNA, 1674 bp, Populus balsamifera subsp. trichocarpa
  misc_feature: Ceres Annot ID no. 1479723
  misc_feature: Encodes the peptide sequence at SEQ ID NO. 359
atggatgcgactaaagaaacggtggggcttatgaatgggagctcagtgtggtcaatatccgaaatggatgatattgatttctctcgcctctctgacaagccaaagttgaacatagagaggaagagatcatttgatgagaggtctcttagcgagctctcgatcgggcttgcaagaggaattgataactttgagaccacgaattcacctggtggaaggtccgggtttaacacgccagcctcatctgctcgcaactcgtttgagcctcacccaatggtggctgatgcatgggaggctctacggcggtctttagttttcttcagaggccaaccggttggtactattgccgcgtatgaccatgcctcagaggaagtcttgaactatgatcaggtttttgtacgagactttgtacccagtgccctagcttttctgatgaatggtgagcctgaaatagtcaagcaattccttctgaagacactacatctccaaggatgggaaaagagaatagatcgattcaagcttggtgaaggggcaatgccagccagctttaaagttcttcacgatcctattcgaaaaacagactctctggttgcagattttggtgagagcgcaattggaagagttgctccagtggactctggtttttggtggatcattctgctccgagcatatacaaagtctactggagatttatctctagcagaaactccagagtgccagaaaggaatgaggctcatattgacgttgtgcttgtcagaggggtttgatactttccctacccttctatgtgccgatggatgctctatgattgatcgcagaatgggcatctatggttatcctattgaaattcaagcactttttttcatggcattgagaagcgcttgctcattgttgaaacatgacgaagaaggaaaagaatgtattgagagaattgtgaaacgtttgcatgccttgagctatcacatgcggagttacttctggcttgactttcaacaactgaatgacatatacagatataagactgaggagtactctcacactgctgtaaataagttcaacgttattcctgattcaatcccagattgggtatttgatttcatgccaactcgtggaggctactttattggcaatgttagtcccgcgaggatggattttagatggtttgctttaggaaattgcattgccatcctgtcttctcttgcaactcatgaacaagcaatggctatcatggatctcattgaagctcgctgggaggagctagtgggagaaatgcctctaaaaatagcttatcctgcaatagagagtcatgaatggcgaattgtaactggttgcgatcccaagaatactagatggagctatcataatggaggatcttggccagtgcttttatggttgctgactgctgcgtgcatcaaaacgggacgaccccaaatcgcaagaaaagcgattgatcttgctgagacccgtctactgaaagacagctggccggaatattatgatgggaaacttggcagatacattggtaaacaggcaaggaaatatcagacatggtcaattgctggatacttggtggcaaagatgatgctggaggacccttcacacttggggatgatttctttggaagaggacaagcaaatgaatcctgtgctcaagagatcatcttcttggacttgttaa

SEQ ID NO: 359 - protein, 557 aa, Populus balsamifera subsp. trichocarpa
  misc_feature (83)..(550): Pfam name: Invertase_neut Pfam desc: Plant neutral invertase
  misc_feature: Ceres Annot ID no. 1479723
  misc_feature: Bit score of 1536.4 for HMM based on sequences of Figure 4
  misc_feature: Functional Homolog Of Ceres Annot ID no. 876994 at SEQ ID NO. 315
MDATKETVGLMNGSSVWSISEMDDIDFSRLSDKPKLNIERKRSFDERSLSELSIGLARGIDNFETTNSPGGRSGFNTPASSARNSFEPHPMVADAWEALRRSLVFFRGQPVGTIAAYDHASEEVLNYDQVFVRDFVPSALAFLMNGEPEIVKQFLLKTLHLQGWEKRIDRFKLGEGAMPASFKVLHDPIRKTDSLVADFGESAIGRVAPVDSGFWWIILLRAYTKSTGDLSLAETPECQKGMRLILTLCLSEGFDTFPTLLCADGCSMIDRRMGIYGYPIEIQALFFMALRSACSLLKHDEEGKECIERIVKRLHALSYHMRSYFWLDFQQLNDIYRYKTEEYSHTAVNKFNVIPDSIPDWVFDFMPTRGGYFIGNVSPARMDFRWFALGNCIAILSSLATHEQAMAIMDLIEARWEELVGEMPLKIAYPAIESHEWRIVTGCDPKNTRWSYHNGGSWPVLLWLLTAACIKTGRPQIARKAIDLAETRLLKDSWPEYYDGKLGRYIGKQARKYQTWSIAGYLVAKMMLEDPSHLGMISLEEDKQMNPVLKRSSSWTC

SEQ ID NO: 360 - protein, 461 aa, Arabidopsis thaliana
  misc_feature (84)..(461): Pfam name: Invertase_neut Pfam desc: Plant neutral invertase
  misc_feature: Public GI ID no. 42572857
  misc_feature: Bit score of 1112.8 for HMM based on sequences of Figure 4
  misc_feature: Functional Homolog Of Ceres Annot ID no. 876994 at SEQ ID NO. 315
MEEGHKEPLVLRVEGSHCSLSEMDDFDLTRALEKPRQLKIERKRSFDERSMSELSTGYVRQDSILEMAHSPGSRSMVDTPLSVRNSFEPHPMVAEAWEALRRSMVFFRGQPVGTIAAYDHASEEVLNYDQVFVRDFVPSALAFLMNGEPDIVKNFLLKTLQLQGWEKRVDRFKLGEGVMPASFKVLHDPVRKTDTIIADFGESAIGRVAPVDSGFWWIILLRAYTKSTGDLTLSETPECQRGMRLILSLCLSEGFDTFPTLLCADGCSMVDRRMGVYGYPIEIQALFFMALRCALSMLKPDEEGRDFIERIVKRLHALSFHMRSYFWLDFQQLNDIYRYKTEEYSHTAVNKFNVMPDSIPDWVFDFMPLRGGYFVGNVSPARMDFRWFSLGNCVSILSSLATPDQSMAIMDLLEHRWEELVGEMPLKICYPCIESHEWRIVTGCDPKNTRWSYHNGGSWPG

SEQ ID NO: 361 - protein, 534 aa, Arabidopsis thaliana
  misc_feature (61)..(528): Pfam name: Invertase_neut Pfam desc: Plant neutral invertase
  misc_feature: Public GI ID no. 18395144
  misc_feature: Bit score of 1445.2 for HMM based on sequences of Figure 4
  misc_feature: Functional Homolog Of Ceres Annot ID no. 876994 at SEQ ID NO. 315
MEGVNSSSSISDLDELARLLDRPRVNIERKRSFDERSFSEMGIFDNVNSPGGWETPVSSARNSFEPHPMVAEAWDALRRSLVYFRGQPVGTIAAYDHATEEVLNYDQVFVRDFVPSALAFLMNGEPDIVKNFLLKTIQIQGREKRIDRFKLGEGAMPASFKVIHDPIKETDSINADFGESAIGRVAPVDSGFWWIILLRAYTKSTGDTSLAETSECQKGMRLILSLCLSEGFDTFPTLLCADGCSMIDRRMGVYGYPIEIQALFFMALRSAMSMLKHDAEGKEFMERIVKRLHALSFHMRSYFWLDFQQLNDIYRYKTEEYSHTAVNKFNVIPDSIPEWVFDFMPLRGGYFIGNVSPARMDFRWFALGNCVAILASLATPEQSASIMDLIEERWEELVGEMPVKICHPAIESHEWRIVTGCDPKNTRWSYHNGGSWPVLLWLLTAACIKTGRPQIARRAIDLAEARLLKDGWPEYYDGKSGRFIGKQARKFQTWSIAGYLVAKMLLEDPSHLGMISLEEDKQTKPVIKRSYSWT

SEQ ID NO: 362 - protein, 534 aa, Arabidopsis thaliana
  misc_feature (61)..(528): Pfam name: Invertase_neut Pfam desc: Plant neutral invertase
  misc_feature: Public GI ID no. 21594008
  misc_feature: Bit score of 1442.0 for HMM based on sequences of Figure 4
  misc_feature: Functional Homolog Of Ceres Annot ID no. 876994 at SEQ ID NO. 315
MEGVNSSSSISDLDELARLLDRPRVNIERKRSFDERSFSEMGIFDNVNSPGGWETPVSSARNSFEPHPMVAEAWDALRRSLVYFRGQPVGTIAAYDHATEEVLNYDQVFVRDFVPSALAFLMNGEPDIVKNFLLKTIQIQGREKRIDRFKLGEGAMPASFKVIHDPIKETDSINADFGESAIGRVAPVDSGFWWIILLRAYTKSTGDTSLAETSECQKGMRLILSLCLSEGFDTFPTLLCADGCSMIDRRMGVYGYPIEIQALFFMALRSAMSMLKHDAEGKEFMERIVKRLHALSFHMRSYFWLDFQQLNDIYRYKTEEYSHTAVNKFNVIPDSIPEWVFDFMPLRGGYFIGNVSPARMDFRWFALGNCVAILASLATPEQSASIMDLIEERWEELVGAMPVKICHPAIESHEWRIVTGCDPKNTRWSYHNGGSWPVLLWLLTAACIKTGRPQIARRAIDLAEARLLKDGWPEYYDGKSGRFIGKQARKFQTWSIAGYLVAKMLLEDPSHLGMISLEEDKQTKPVIKRSYSWT

SEQ ID NO: 363 - protein, 571 aa, Arabidopsis thaliana
  misc_feature (98)..(564): Pfam name: Invertase_neut Pfam desc: Plant neutral invertase
  misc_feature: Public GI ID no. 15236209
  misc_feature: Bit score of 1434.6 for HMM based on sequences of Figure 4
  misc_feature: Functional Homolog Of Ceres Annot ID no. 876994 at SEQ ID NO. 315
MSSFNLSVDVNQNGNIKNVDSLSTLDDIDDIDFAKLLEKPRPLNIDRLRSLDERSLTELTGSPQLRNADNASRAPDHADYVISPSFGRRSGFNTPRSQPGFESHPMVGEAWDALRRSMVYFRGQPVGTIAAVDNSEEKLNYDQVFVRDFVPSALAFLMNGEPDIVKNFLLKTLRLQSWEKKIDRFQLGEGVMPASFKVFHDPVRNHETLIADFGESAIGRVAPVDSGFWWIILLRAYTKSTGDSSLADMPECQKGIRLILSLCLSEGFDTFPTLLCADGCCMIDRRMGVYGYPIEIQALFFMALRCALLLLKHDGEGKEMVEQIVKRLHALSYHMRSYFWLDLKQLNDIYRYKTEEYSHTAVNKFNVIPDSLPEWVFDFMPPHGGFFIGNVSPARMDFRWFALGNCIAILSSLATPEQSTAIMDLIESRWEELVGEMPLKVCYPAIESHEWRIVTGCDPKNTRWSYHNGGSWPVLLWLLTAACIKTGRPQIARRAIEVAEARLHKDHWPEYYDGKVGRYVGKQSRKNQTWSVAGYLVAKMMLEDPSHVGMVCLEEDKQMKPVMRRSNSWTC

SEQ ID NO: 364 - protein, 571 aa, Vitis vinifera
  misc_feature (98)..(564): Pfam name: Invertase_neut Pfam desc: Plant neutral invertase
  misc_feature: Public GI ID no. 157335158
  misc_feature: Bit score of 1423.6 for HMM based on sequences of Figure 4
  misc_feature: Functional Homolog Of Ceres Annot ID no. 876994 at SEQ ID NO. 315
MSPIPMDVYSNGNVKNLETASTTVQIDDSDFLRLLDRPRPISIERNRSFEEKSFNELSSTLSPLLFHRNVEKNSFHIFDLLDHTFSPVRSSLNTPRSNHCFEPHPVFTDAWEALRRSLVYFRGQPVGTIAAIDHSSDELNYDQVFVRDFVPSALAFLMNGEPEIVKNFILKTLRLQSWEKKVDQFKLGEGVMPASFKVFHDPVRNYETLIADFGESAIGRVAPVDSGFWWIILLRAYTKSTGDSSLAEMPECQRGMRLILSLCLSEGFDTYPTLLCADGCCMIDRRMGVYGYPIEIQALFFMALRCALLLLKQDDKGKEFVELISKRLHALSYHMQSYFWLDIKQLNDIYRYKTEEYSHTAVNKFNVMPDSLPDWVFDFMPSRGGYFIGNVSPAKMDFRWFCLGNCVAILSSLATPEQSSAIMDLIESRWQELVGEMPLKICYPAFESHEWRIVTGCDPKNTRWSYHNGGSWPVLIWLLTAACIKTGRPQIARRAIELAESRLLKDNWPEYYDGKLGRYIGKQARKFQTWSIAGYLVAKMMLDDPSHLGMISLEEDKQLKPLFKRSLSWSH

SEQ ID NO: 365 - DNA, 1716 bp, Sorghum bicolor
  misc_feature: Ceres Annot ID no. 6086289
  misc_feature: Encodes the peptide sequence at SEQ ID NO. 366
atggaggcggcggcgatgcgcaaggcgtcgtcgcaggcgtcgctggcggacccggacgacttcgacctgacgcggctgctgaaccacaagccgcggatcaacgtggagaggcagcggtcgttcgacgaccgctccctcggcgagctctcgctcgccggcgcgggcgcgggcacgggcagccgcggcggctggggctactacggcgtaggggtggagagctacgagagcatgtactcccccggcggcgggctgcggtcctactgcggcacgccggcctcgtccacgcggctctcgttcgagccccacccgctgatcggcgaggcctgggacgcgctgcgccgctccatcgtgtccttccgcgaccagccgatcggcaccatcgccgccgtcgaccactccgccgccgccgaagtgctcaactacgaccaggtgttcgttagggacttcgtcccgagcgcgttggcgttcctgatgaacggggagcccgaaatcgtgcgcaacttcctgctgaagacgctgctgctgcaggggtgggagaagcggatcgaccgcttcaagctcggcgagggcgccatgccggcgagcttcaaggtgctcaaggaccccaagcgcggcgtggacaagctggtggccgacttcggggagagcgccatcgggcgtgtggcgccggtggattccgggttctggtggatcatcatcctgagggcctacaccaagtccaccggcgacatgacgctcgccgagacgcccatgtgccagaagggcatccggctcatcatgaaccagtgcctcgccgagggcttcgacaccttccccaccctgctctgcgccgacggatgctgcatgatcgatcgcagaatgggcgtgtacgggtacccgatcgagatccaggccctgttcttcatggcgctgcggtgcgcgctggtgatgctgaagccggacgcggaggggaaggagatcatggagcggatcgtgacgcggctggcggcgctgagctaccacatgcggagctacttctggctggacttccagcagctcaacgacatctaccggttcaagacggaggagtactcgcacacggccgtcaacaagttcaacgtcaacccggagtccatcccggactggctcttcgacttcatgcccacccgcggcggctacttcgtcggcaacgtcagccccgcccggatggacttccggtggttcgcgctcggcaactgcgtcgccatcctcgcgtcgctcgccacgcccgaccaggccgctgccatcatggacctcatcgaggagcgctgggaggacctcgtcggcgagatgcctgtcaagatatgctacccggccatcgaggggcacgagtggcagatcgtcaccggctgcgaccccaagaacaccagatggagctaccacaacgggggatcatggccagtgctgctgtggctgctcacggcggcatgcatcaagaccgggaggctgaagattgctcggcgcgccatcgacctagccgaggcgaggctcgcgagggacggctggccagagtactacgacggcaagctgggccgctacatcggcaagcaggcgaggaagttccagacgtggtccatcgcggggtacctggtggccaaaatgatgctggaggacccgtctcacctcggcatgatctccctggaggaggagaagccgaccaaaccggtgctcaggaggtcggcctcttggacagggtaa

SEQ ID NO: 366 - protein, 571 aa, Sorghum bicolor
  misc_feature (96)..(564): Pfam name: Invertase_neut Pfam desc: Plant neutral invertase
  misc_feature: Ceres Annot ID no. 6086289
  misc_feature: Bit score of 1471.1 for HMM based on sequences of Figure 4
  misc_feature: Functional Homolog Of Ceres Annot ID no. 876994 at SEQ ID NO. 315
MEAAAMRKASSQASLADPDDFDLTRLLNHKPRINVERQRSFDDRSLGELSLAGAGAGTGSRGGWGYYGVGVESYESMYSPGGGLRSYCGTPASSTRLSFEPHPLIGEAWDALRRSIVSFRDQPIGTIAAVDHSAAAEVLNYDQVFVRDFVPSALAFLMNGEPEIVRNFLLKTLLLQGWEKRIDRFKLGEGAMPASFKVLKDPKRGVDKLVADFGESAIGRVAPVDSGFWWIIILRAYTKSTGDMTLAETPMCQKGIRLIMNQCLAEGFDTFPTLLCADGCCMIDRRMGVYGYPIEIQALFFMALRCALVMLKPDAEGKEIMERIVTRLAALSYHMRSYFWLDFQQLNDIYRFKTEEYSHTAVNKFNVNPESIPDWLFDFMPTRGGYFVGNVSPARMDFRWFALGNCVAILASLATPDQAAAIMDLIEERWEDLVGEMPVKICYPAIEGHEWQIVTGCDPKNTRWSYHNGGSWPVLLWLLTAACIKTGRLKIARRAIDLAEARLARDGWPEYYDGKLGRYIGKQARKFQTWSIAGYLVAKMMLEDPSHLGMISLEEEKPTKPVLRRSASWTG

SEQ ID NO: 367 - protein, 494 aa, Oryza sativa subsp. indica
  misc_feature (20)..(487): Pfam name: Invertase_neut Pfam desc: Plant neutral invertase
  misc_feature: Public GI ID no. 125539847
  misc_feature: Bit score of 1363.4 for HMM based on sequences of Figure 4
  misc_feature: Functional Homolog Of Ceres Annot ID no. 876994 at SEQ ID NO. 315
MYSPGGGLRSLVGTPASSALHSFEPHPIVGDAWEALRRSLVFFRGQPLGTIAAFDHASEEVLNYDQVFVRDFVPSALAFLMNGEPEIVRHFLLKTLLLQGWEKKVDRFKLGEGAMPASFKVLHDSKKGVDTLHADFGESAIGRVAPVDSGFWWIILLRAYTKSTGDLTLAETPECQKGMRLILSLCLSEGFDTFPTLLCADGCCMIDRRMGVYGYPIEIQALFFMALRCALQLLKHDNEGKEFVERIATRLHALSYHMRSYYWLDFQQLNDIYRYKTEEYSHTAVNKFNVIPDSIPDWLFDFMPCQGGFFIGNVSPARMDFRWFALGNMIAILSSLATPEQSTAIMDLIEERWEELIGEMPLKICYPAIENHEWRIVTGCDPKNTRWSYHNGGSWPVLLWLLTAACIKTGRPQIARRAIDLAERRLLKDGWPEYYDGKLGRYVGKQARKFQTWSIAGYLVAKMMLEDPSHLGMISLEEDKAMKPVLKRSASWTN

SEQ ID NO: 368 - DNA, 1722 bp, Populus balsamifera subsp. trichocarpa
  misc_feature: Ceres Annot ID no. 1450491
  misc_feature: Encodes the peptide sequence at SEQ ID NO. 369
atgtccagtcttgatggagatgtgtctcaaaatgggagcttgaagagtgtcgatgcccatcctgctttggctgaaatagaagatttggatttctcaaggatcttggataagccaccaaggcctttgaatatggagaggcaaagatcatgtgatgagaggtccctaaatgaattgtttggggtgcctttgctttctcctcgtccctcatcaagagccgagagtaacttcaggttaattgatcatcttgatggtttatattcccctggtagaaggtcaggattcaatactccaaggtcacagtatgggtttgagacacatccagctgtggctgaagcttgggacgctttgaggagatcgttggttgtttttcgtggccaacctgttggaaccatagcagctttggataatactggggaacagcttaattatgatcaggtgtttgtaagagattttgtcccaagtgcattggcttttctgatgaacggggaacctgaaatagtaaagaattttattttgaagactcttcgcctccaatcatgggagaaaaaaattgacagattccatcttggagaaggagttatgcctgcgagttttaaggtactccacgatcctgtcaggaacagtgagactttgatggcagattttggtgagagtgcaataggaagagtggctcccgttgattctggattttggtggattttcttacttcgagcatacaccaagtccacaggcgacacatcattggctgaaatgccagaatgtcagaagggtatgcgcctaattttgagtttatgcctttcagaggggtttgacacattccctactcttctttgcgctgatggatgctgcatgattgatcgcagaatgggtgtttatgggtatcccattgaaattcaagcacttttcttcatggctttaagatgtgctttgcttctactgaagcaagatgaggaggggaaagagtttgtagagcggatcactaaacgccttcatgccttaagttttcacatgaggagttattattggattgacttgaaacagcttaatgatatatatcgttataaaacagaggaatactctcatactgcagttaacaagtttaatgtaattcccgattctcttccagaatggatatttgattttatgccagtccatggtggctactttattggaaatgttagtcctgcaaaaatggacttccgttggttttgcttgggcaactgtattgcaatcttgtcatccttggcaacccctgaacaatcgacagcgataatggatcttatagaatcacggtgggaggaattggttggagaaatgccactcaaggtaatctatccagcgatagagagtcatgaatggcggattgttacaggatgtgatccaaaaaatactagatggagttaccacaatggaggatcctggccagtgctcttgtggcttctcaccgcagcatgcataaagaccggacgcccccaaattgcaagacgtgccattgagctcgcagagacaagattagttaaagacaactggccagaatattatgatggaaagcttggtcgattcgttgggaaacaggcgcgtaaattccagacctggtccattgcaggttacttggttgcaaaaatgttgttggaagacccttctcatttgggtatggtggcactcgaagaagacaaacaaatgaagcctcccatgagaagatcacattcatggacattctga

SEQ ID NO: 369 - protein, 573 aa, Populus balsamifera subsp. trichocarpa
  misc_feature (100)..(566): Pfam name: Invertase_neut Pfam desc: Plant neutral invertase
  misc_feature: Ceres Annot ID no. 1450491
  misc_feature: Bit score of 1433.0 for HMM based on sequences of Figure 4
  misc_feature: Functional Homolog Of Ceres Annot ID no. 876994 at SEQ ID NO. 315
MSSLDGDVSQNGSLKSVDAHPALAEIEDLDFSRILDKPPRPLNMERQRSCDERSLNELFGVPLLSPRPSSRAESNFRLIDHLDGLYSPGRRSGFNTPRSQYGFETHPAVAEAWDALRRSLVVFRGQPVGTIAALDNTGEQLNYDQVFVRDFVPSALAFLMNGEPEIVKNFILKTLRLQSWEKKIDRFHLGEGVMPASFKVLHDPVRNSETLMADFGESAIGRVAPVDSGFWWIFLLRAYTKSTGDTSLAEMPECQKGMRLILSLCLSEGFDTFPTLLCADGCCMIDRRMGVYGYPIEIQALFFMALRCALLLLKQDEEGKEFVERITKRLHALSFHMRSYYWIDLKQLNDIYRYKTEEYSHTAVNKFNVIPDSLPEWIFDFMPVHGGYFIGNVSPAKMDFRWFCLGNCIAILSSLATPEQSTAIMDLIESRWEELVGEMPLKVIYPAIESHEWRIVTGCDPKNTRWSYHNGGSWPVLLWLLTAACIKTGRPQIARRAIELAETRLVKDNWPEYYDGKLGRFVGKQARKFQTWSIAGYLVAKMLLEDPSHLGMVALEEDKQMKPPMRRSHSWTF

SEQ ID NO: 370 - DNA, 1710 bp, Populus balsamifera subsp. trichocarpa
  misc_feature: Ceres Annot ID no. 1460693
  misc_feature: Encodes the peptide sequence at SEQ ID NO. 371
atgtctagtattaatgtagatgtgtctctaaaaggaagcttgagaaatgctgaaaccctttgtgatatggctgaaattgaagaaatggatttctcaaggatttttgataggccaccaaggcctttgaatatggacaggcaaagatcatgcgatgaaaggtccctaagcgaattgtctactgggttgccaattccttctcctcgtccctcgtcaagagttgagaataattttaggttaattgaccaccttaattgtttgccttctcccggtagaaggtcagggtttaatactccattatcacaatttggggttgagacacatccaactgtggctgaagcttgggaggctttgaggagatcattggtttattttcgtggtgaacctgttggaaccatagcagcactggataattctgaggaacaggtgtttgtaagagattttgtcccaagtgcattggcttttctgatgaacggggaacctgaaatagtcaagaatttcatcttgaagactcttcgccttcaatcatgggagaaaaagattgacagattccagcttggagaaggggtaatgcctgcaagttttaaagtactccacgatcctgtcacgcacaatgagactttgatggcagattttggtgagagtgcaataggaagagtggctcctgttgattctgggttttggtggattttcttactccgagcatacaccaagtccacaggcgacacatcattggctgaaaagccagaatgtcagaagggcatgcgcctaattttgagtttatgtctttcagaggggtttgacacattcccgactcttctttgcgccgatggatgctgcatggttgatcgcagaatgggtgtttatgggtatcccattgaaattcaagcacttttcttcatggctttaagatgtgctttgcttttactgaagcaagacgaggaggggaatgagtttgtagaacggattacaaaacgccttcacgcgttaagttttcacatgaggagttattattggattgacctgaaacagcttaatgatatatatcgctataaaacagaggaatattctcatactgctgttaacaagtttaatgtaatacctgattctcttccagaatggatttttgattttatgccagtccgtggtggttactttatcgggaatgttagtcctgcaagaatggacttccgttggttttgcttgggtaattgtattgcaattctgtcatccttggcaacccctgaacaatccaccgcaataatggatcttatagaatcacggtgggaggaattggttggagaaatgccactcaaggtaatctatccagcaatagagagccatgaatggcggattgttacaggatgtgatccaaaaaacactagatggagttaccacaatggaggatcctggccagtgctcttgtggcttctcaccgcggcatgcatcaagactggccgcccccaaatcgcaagacgtgctatcgagctcgccgaaacaagattaataaaagacaactggccggaatattacgatgggaaacttggtcgtttcattgggaaacaggctcgtaaatcccaaacctggtccattgctggttacttggttgcaaaaatgatgctggaagacccttctcatttgggtacggtggcactcgaggaagacaaacaaatgaagcctcccattagaagatcaaattcatggaccttctga

SEQ ID NO: 371 - protein, 569 aa, Populus balsamifera subsp. trichocarpa
  misc_feature (101)..(562): Pfam name: Invertase_neut Pfam desc: Plant neutral invertase
  misc_feature: Ceres Annot ID no. 1460693
  misc_feature: Bit score of 1396.9 for HMM based on sequences of Figure 4
  misc_feature: Functional Homolog Of Ceres Annot ID no. 876994 at SEQ ID NO. 315
MSSINVDVSLKGSLRNAETLCDMAEIEEMDFSRIFDRPPRPLNMDRQRSCDERSLSELSTGLPIPSPRPSSRVENNFRLIDHLNCLPSPGRRSGFNTPLSQFGVETHPTVAEAWEALRRSLVYFRGEPVGTIAALDNSEEQVFVRDFVPSALAFLMNGEPEIVKNFILKTLRLQSWEKKIDRFQLGEGVMPASFKVLHDPVTHNETLMADFGESAIGRVAPVDSGFWWIFLLRAYTKSTGDTSLAEKPECQKGMRLILSLCLSEGFDTFPTLLCADGCCMVDRRMGVYGYPIEIQALFFMALRCALLLLKQDEEGNEFVERITKRLHALSFHMRSYYWIDLKQLNDIYRYKTEEYSHTAVNKFNVIPDSLPEWIFDFMPVRGGYFIGNVSPARMDFRWFCLGNCIAILSSLATPEQSTAIMDLIESRWEELVGEMPLKVIYPAIESHEWRIVTGCDPKNTRWSYHNGGSWPVLLWLLTAACIKTGRPQIARRAIELAETRLIKDNWPEYYDGKLGRFIGKQARKSQTWSIAGYLVAKMMLEDPSHLGTVALEEDKQMKPPIRRSNSWTF

SEQ ID NO: 372 - DNA, 1668 bp, Populus balsamifera subsp. trichocarpa
  misc_feature: Ceres Annot ID no. 1452868
  misc_feature: Encodes the peptide sequence at SEQ ID NO. 373
atgtctccgattgctgccatggatgtgtgtcaaaatgcaagtgtcaaaaactttgaggcagcaggctctatttttgaaattgattccgaattcttaagattgtctgacaagcctagacctgtcaatgtggagagaaagagatccttcgatgaaagatcatttagtgaaaattcctttcgcataatagaccatcttgagaatttgtctcccgcaggaagaaggtctggttttaatacaccaaggtcatgtggttttgaatcacaccccatggtagtcgatgcgtgggaatcgttgagaagaacattggtttacttccggagccaacctgtcgggactatcgctgcattggaccattctgtcgaagaactcaactatgatcaggtatttgttagagattttgtaccgagtgctttagcttttctgatgaatggggagcacgaggtagtcaggaattttcttttgaaaacccttcatctccagtcacgtgagaaaatggtagaccagttcaagctaggagcaggagtgatgccagcaagttttaaagtgctccatcatcctgatagaaatattgagactttaatggctgactttggcgagagtgcgataggaagagtggctcctgttgattctggattttggtggattatattgcttcgtgcatataccaagtccacaggagattcttccttggctgaaatgcctgaatgtcaaaggggtatgcgccttatcctgaatctgtgtctgtcagaaggctttgacacattcccaactctgctctgtgccgatggatgctgtatgatcgaccgtcgaatgggtgtgtatggatatcctattgagattcaagcactcttctttatggcactaaggtgtgctttgattctactcaagcaagatgatgaagggaaggaatttgtggatcgggtagctacgcggctccatgctttaagctatcacatgcgcaattatttttggctagacatgaagcaactcaacgacatatatcggtataagacagaggagtattctcatactgctgttaacaagttcaatgttatgcctgattctcttccagattgggttttcgatttcatgccgactcgtggtggctacttcattggaaatgttagtcctgcgagaatggactttcgttggttctgtttaggtaattgtgttgcaattttgtcatctctggcaactcctgagcaagcttcagcaataatggatctaattgaatctcgatgggaagaactggttggagaaatgccactgaaaatctgttatccagccctagaaagtcatgaatggcgtactgtgaccggctgtgatccgaagaatactaggtggagttaccacaatggagggtcctggccagtccttttatggcttctaacagcagcttgtatcaagactggccgtcctcaaattgctaggcgtgccattgaacttgctgaaagccggttatcaaaggatcactggcctgaatactatgatggcaagcttggtttatacgttggaaagcaggctcgcaaattccaaacgtggtccattgccggctacttggttgccaaaatgatgcttgaagatccatctcatcttggcatgatttcactcgaggaagacaaacaaattacgcacttggtgaaaagatctgcttcgtggacttgttga

SEQ ID NO: 373 - protein, 549 aa, Populus balsamifera subsp. trichocarpa
  misc_feature (76)..(542): Pfam name: Invertase_neut Pfam desc: Plant neutral invertase
  misc_feature: Ceres Annot ID no. 1452868
  misc_feature: Bit score of 1428.9 for HMM based on sequences of Figure 4
  misc_feature: Functional Homolog Of Ceres Annot ID no. 876994 at SEQ ID NO. 315
MDVCQNASVKNFEAAGSIFEIDSEFLRLSDKPRPVNVERKRSFDERSFSENSFRIIDHLENLSPAGRRSGFNTPRSCGFESHPMVVDAWESLRRTLVYFRSQPVGTIAALDHSVEELNYDQVFVRDFVPSALAFLMNGEHEVVRNFLLKTLHLQSREKMVDQFKLGAGVMPASFKVLHHPDRNIETLMADFGESAIGRVAPVDSGFWWIILLRAYTKSTGDSSLAEMPECQRGMRLILNLCLSEGFDTFPTLLCADGCCMIDRRMGVYGYPIEIQALFFMALRCALILLKQDDEGKEFVDRVATRLHALSYHMRNYFWLDMKQLNDIYRYKTEEYSHTAVNKFNVMPDSLPDWVFDFMPTRGGYFIGNVSPARMDFRWFCLGNCVAILSSLATPEQASAIMDLIESRWEELVGEMPLKICYPALESHEWRTVTGCDPKNTRWSYHNGGSWPVLLWLLTAACIKTGRPQIARRAIELAESRLSKDHWPEYYDGKLGLYVGKQARKFQTWSIAGYLVAKMMLEDPSHLGMISLEEDKQITHLVKRSASWTC

SEQ ID NO: 374 - protein, 574 aa, Oryza sativa subsp. japonica
  misc_feature (97)..(567): Pfam name: Invertase_neut Pfam desc: Plant neutral invertase
  misc_feature (193)..(539): Pfam name: GDE_C Pfam desc: Amylo-alpha-1,6-glucosidase
  misc_feature: Public GI ID no. 115458460
  misc_feature: Bit score of 1419.7 for HMM based on sequences of Figure 4
  misc_feature: Functional Homolog Of Ceres Annot ID no. 876994 at SEQ ID NO. 315
MEVAGMRKASSHASMAAAAADPDDFDLTRMLNHRPRINVDRQRSFDDRSLAELSISGTASRGGGGGGYPAMMESYESMYSPGGGLRSLCGTPASSTRLSFDPHPLVFDAWDALRRSLVCFRGQPLGTIAAVDHSSDEVLNYDQVFVRDFVPSALAFLMNGEPEIVKNFLLKTLLLQGWEKRIDRFKLGEGAMPASFKVLKDAKRGGAERLVADFGESAIGRVAPVDSGFWWIILLRAYTKSTGDLSLAETAECQRGIRLIMNQCLAEGFDTFPTLLCADGCCMIDRRMGVYGYPIEIQALFFMALRCALLMLKPDAPEGKETMDRVATRLHALTYHMRSYFWLDFQQLNDVYRYRTEEYSHTAVNKFNVIPESIPDWVFDFMPSRGGYFVGNVSPARMDFRWFALGNFVAILASMATPEQAAAIMDLIEERWEDLIGEMPLKISFPAIESHEWEFVTGCDPKNTRWSYHNGGSWPVLLWLLTAACIKTGRLKIARRAIELAEARLARDGWPEYYDGKLGRYVGKQARKLQTWSVAGYLVAKMMVEDPSHLGMISLEEDRAMMKPVLKRSASWTV

SEQ ID NO: 375 - protein, 548 aa, Oryza sativa subsp. japonica
  misc_feature (74)..(541): Pfam name: Invertase_neut Pfam desc: Plant neutral invertase
  misc_feature: Public GI ID no. 115484433
  misc_feature: Bit score of 1447.4 for HMM based on sequences of Figure 4
  misc_feature: Functional Homolog Of Ceres Annot ID no. 876994 at SEQ ID NO. 315
MKRVSSHVSIASEAEINLDLSRLLIDKPRLTLERKRSFDEQSWSELSHRQNDGFDSIMHSPAFPSGFDSPFSLGTLGDPHPLVNEAWEALRKSVVYFRGQPVGTIAAVDHASEEVLNYDQVFVRDFFPSALAFLMNNETDIVKNFLLKTLHLQSSEKMVDRFKLGAGAMPASFKVDRNRNRNTETLVADFGESAIGRVAPVDSGFWWIILLRAYTKYTADTSLAESPECQNCMRLILNLCLSEGFDTFPTLLCTDGCSMIDRRMGIYGYPIEIQALFYMALRCALQMLKPDGEGKDFIEKIGQRLHALTYHMRNYFWLDFPHLNNIYRYKTEEYSHTAVNKFNVIPDSIPDWVFDFMPCRGGYFLGNVSPAMMDFRWFALGNCIAIISSLATPEQSVAIMDLIEERWEELVGEMPLKICYPAIENHEWRIITGCDPKNTRWSYHNGGSWPVLLWLLTAACIKTGRPQMAKRAIELAESRLLKDGWPEYYDGKLGRFIGKQARKFQTWSIAGYLVARMMLEDPSTLMMISMEEDRPVKPTMRRSASWNA

SEQ ID NO: 376 - protein, 884 aa, Oryza sativa subsp. japonica
  misc_feature (74)..(541): Pfam name: Invertase_neut Pfam desc: Plant neutral invertase
  misc_feature (742)..(881): Pfam name: DUF1618 Pfam desc: Protein of unknown function (DUF1618)
  misc_feature: Public GI ID no. 125576397
  misc_feature: Bit score of 1432.3 for HMM based on sequences of Figure 4
  misc_feature: Functional Homolog Of Ceres Annot ID no. 876994 at SEQ ID NO. 315
MKRVSSHVSIASEAEINLDLSRLLIDKPRLTLERKRSFDEQSWSELSHRQNDGFDSIMHSPAFPSGFDSPFSLGTLGDPHPLVNEAWEALRKSVVYFRGQPVGTIAAVDHASEEVLNYDQVFVRDFFPSALAFLMNNETDIVKNFLLKTLHLQSSEKMVDRFKLGAGAMPASFKVDRNRNRNTETLVADFGESAIGRVAPVDSGFWWIILLRAYTKYTADTSLAESPECQNCMRLILNLCLSEGFDTFPTLLCTDGCSMIDRRMGIYGYPIEIQALFYMALRCALQMLKPDGEGKDFIEKIGQRLHALTYHMRNYFWLDFPHLNNIYRYKTEEYSHTAVNKFNVIPDSIPDWVFDFMPCRGGYFLGNVSPAMMDFRWFALGNCIAIISSLATPEQSVAIMDLIEERWEELVGEMPLKICYPAIENHEWRIITGCDPKNTRWSYHNGGSWPVLLWLLTAACIKTGRPQMAKRAIELAESRLLKDGWPEYYDGKLGRFIGKQARKFQTWSIAGYLVARMMLEDPSTLMMISMEEDRPVKPTMRRQDHRGGLPLLVRPSRPRLPPPRVATGGVGAKLPLLTVRRLRIRSSSLPALDVRRRCPRRLRAPRDALPEGRVPTIRDRLLLLQCRRRRRGPTTAAAVVVALPTYQGTNTKPPRLRGGSTGLLVRRCGDDDDDELVVAALLTEEYRRRDTLEGAELVVLRSGEWSATPIAPIVHDDGKGEELSYWETDMAVPVGDRLLCYVDLYRGVILCGDDLFDEIPPRLQYVSLPVEAPAGAFDEEHFDRQGDNYRRCLLNTRTVVCAIDGGGAALKFVDISSRCCCGSLGKHTTCDRSSRAFVIRTWTLRIDGDGDDDMAWTMDAMIDAAELGPSTPTPPSHGAFHYTP

SEQ ID NO: 377 - protein, 593 aa, Oryza sativa subsp. indica
  misc_feature (97)..(586): Pfam name: Invertase_neut Pfam desc: Plant neutral invertase
  misc_feature: Public GI ID no. 125548352
  misc_feature: Bit score of 1390.6 for HMM based on sequences of Figure 4
  misc_feature: Functional Homolog Of Ceres Annot ID no. 876994 at SEQ ID NO. 315
MEVAGMRKASSHASMAAAAADPDDFDLTRMLNHRPRINVDRQRSFDDRSLAELSISGTASRGGGGGGYPAMMESYESMYSPGGGLRSLCGTPASSTRLSFDPHPLVFDAWDALRRSLVCFRGQPLGTIAAVDHSSDEVLNYDQVFVRDFVPSALAFLMNGEPEIVKNFLLKTLLLQGWEKRIDRFKLGEGAMPASFKVLKDAKRGGAERLVADFGESAIGRVAPVDSGFWWIILLRAYTKSTGDLSLAETAECQRGIRLIMNQCLAEGFDTFPTLLCADGCCMIDRRMVIKRFDFGQNQTALNLIKMGVYGYPIEIQALFFMALRCALLMLKPDAPEGKETMDRVATRLHALTYHMRSYFWLDFQQLNDVYRYRTEEYSHTAVNKFNVIPESIPDWVFDFMPSRGGYFVGNVSPARMDFRWFALGNFVAILASMATPEQAAAIMDLIEERWEDLIGEMPLKISFPAIESHEWEFVTGCDPKNTRWSYHNGGSWPVLLWLLTAACIKTGRLKIARRAIELAEARLARDGWPEYYDGKLGRYVGKQARKLQTWSVAGYLVAKMMVEDPSHLGMISLEEDRAMMKPVLKRSASWTV

SEQ ID NO: 378 - protein, 460 aa, Arabidopsis thaliana
  misc_feature (76)..(460): Pfam name: Invertase_neut Pfam desc: Plant neutral invertase
  misc_feature: Public GI ID no. 79319205
  misc_feature: Bit score of 1074.6 for HMM based on sequences of Figure 4
  misc_feature: Functional Homolog Of Ceres Annot ID no. 876994 at SEQ ID NO. 315
MEGVGLRAVGSHCSLSEMDDLDLTRALDKPRLKIERKRSFDERSMSELSTGYSRHDGIHDSPRGRSVLDTPLSSARNSFEPHPMMAEAWEALRRSMVFFRGQPVGTLAAVDNTTDEVLNYDQVFVRDFVPSALAFLMNGEPDIVKHFLLKTLQLQGWEKRVDRFKLGEGVMPASFKVLHDPIRETDNIVADFGESAIGRVAPVDSGFWWIILLRAYTKSTGDLTLSETPECQKGMKLILSLCLAEGFDTFPTLLCADGCSMIDRRMGVYGYPIEIQALFFMALRSALSMLKPDGDGREVIERIVKRLHALSFHMRNYFWLDHQNLNDIYRFKTEEYSHTAVNKFNVMPDSIPEWVFDFMPLRGGYFVGNVGPAHMDFRWFALGNCVSILSSLATPDQSMAIMDLLEHRWAELVGEMPLKICYPCLEGHEWRIVTGCDPKNTRWSYHNGGSWPGLFSFPGD

SEQ ID NO: 379 - DNA, 1692 bp, Sorghum bicolor
  misc_feature: Ceres Annot ID no. 6007912
  misc_feature: Encodes the peptide sequence at SEQ ID NO. 380
atggtacaatgtactcaacctcctccccagttaaagctcccagagagtaagatcacagaactgacagatgatgagaaccatgattcgccgccaaaacttgagaaaaggacaaggatgcaccacattgagaggcacagatcttgtgttgtgaccttatctgacatagaacttaatggtctgcaacctcgtcgtctgctccagaccattgagaaaagcccaggaggaggatcacagtgttcgctccatgaagaaacacctacagatactaatgcatcacacaggcatgcaattgcagatgctgcttgggaagccctcaaaaggtcaatagtttacttcagaggccagccaattgggactgttgctgcaatagacaagtctcagggggcagcactcaactatgaccaggttttcatgagggatttcattcctagcgcattggcttttcttatgaaaggagaacacttgatagtgaagaattttctggtagaaactgcacgccttcagtcaagggagaagatggttgaccttttcaagcttggtcagggtgtgatgcctgcaagctttaaggtgcatcatcgcaatcctacccagaagacagaaagcttactggctgattttggtgaaactgccattgggagggttgctcctgtagattctggcttatggtggattattctccttcgtgcttacaccaaatggacaggggataattctctggctgaaagtcctaactgccaaagggccatgcaccttattctcaggttgtgtctctcagagggatgtgatacttctccagccttgctttgtgctgatgggtgctccatgatagaccgaagaatgggcatatatggctacccaattgaaatccaggctctctttttcatggctatgagatgtgccctaagcttgttgaagcaagactctgacgctgactttgtgaatcacatcacaaaacgaatccaagctttgagctaccatttgcacagttactactggttagacttccaaagacttaatgacatataccgctacaagactgaagagtactcacagacagctttgaacaagttcaatgtgatacctgaatcgatacctgattggatatttgacttcatgcctagccggggtggatacttcattggtaatgttagtcctgcaaggatggatttccgctggttttgcttgggcaacttcattgcaattctatcatcattggcgactggagagcaggctgaagcaatactggatcttgtggaggagcgctggcaagaactcattggtgagatgccactcaagatctgctaccctgcgatggaaaatcaggaatggcagatagtcactggatgcgacccgaagaacaccaggtggagctaccacaacggaggctcatggccagtgctgctgtggctgctggtggcggtgagcgtgaagctggggcgccctcacctggcgcggagagccgtggagctgatggagcagcggctggccaaggacgacttccccgagtactacgacggcaaggcggggcggtacgtggggaagcaggcgcgcaagttccagacgtggtcggtggccggctacctggtggccaagatgctcctggacgacccctcccacctgcggatcgtggcgctggaggacgacggccactcccgtgctcccttcctcaagcgctccaactcgtgcccatga

SEQ ID NO: 380 - protein, 563 aa, Sorghum bicolor
  misc_feature (89)..(556): Pfam name: Invertase_neut Pfam desc: Plant neutral invertase
  misc_feature: Ceres Annot ID no. 6007912
  misc_feature: Bit score of 1166.5 for HMM based on sequences of Figure 4
  misc_feature: Functional Homolog Of Ceres Annot ID no. 876994 at SEQ ID NO. 315
MVQCTQPPPQLKLPESKITELTDDENHDSPPKLEKRTRMHHIERHRSCVVTLSDIELNGLQPRRLLQTIEKSPGGGSQCSLHEETPTDTNASHRHAIADAAWEALKRSIVYFRGQPIGTVAAIDKSQGAALNYDQVFMRDFIPSALAFLMKGEHLIVKNFLVETARLQSREKMVDLFKLGQGVMPASFKVHHRNPTQKTESLLADFGETAIGRVAPVDSGLWWIILLRAYTKWTGDNSLAESPNCQRAMHLILRLCLSEGCDTSPALLCADGCSMIDRRMGIYGYPIEIQALFFMAMRCALSLLKQDSDADFVNHITKRIQALSYHLHSYYWLDFQRLNDIYRYKTEEYSQTALNKFNVIPESIPDWIFDFMPSRGGYFIGNVSPARMDFRWFCLGNFIAILSSLATGEQAEAILDLVEERWQELIGEMPLKICYPAMENQEWQIVTGCDPKNTRWSYHNGGSWPVLLWLLVAVSVKLGRPHLARRAVELMEQRLAKDDFPEYYDGKAGRYVGKQARKFQTWSVAGYLVAKMLLDDPSHLRIVALEDDGHSRAPFLKRSNSCP

SEQ ID NO: 381 - DNA, 1457 bp, Gossypium hirsutum
  misc_feature: Ceres Clone ID no. 1941767
  misc_feature: Encodes the peptide sequence at SEQ ID NO. 382
aactagcttcctttttcctctctctctctcttcttaccgaccgttttcctgcctggtcgccgtttagttttctaaaccgaggttgccggagagtccattttctccgacatttcttccttctcaaaagatctcttcttttgagacttgacttccggttttgttgattgaagacaaagaaatggaagggactaaagagatggggcttagaaatgtgagctcaacgtgctcaatcaacgaaatggatgattatgatctctcacgtcttcttgataagccaaggcttaacatagagaggcaaagatcatttgatgagaggtcactcagtgagctctctattggtctcaccagagcaggtcttgacaattacgagaccacatactctcctggtgggaggtcaaggtcaggtttcgatactccggcttcatcgactagaaactcatttgagccacaccccatggtggctgaagcatgggaagctctcaggaggtctttggtgtatttcagagaccagccagttggtaccattgccgcatatgaccatgcttccgaggaagttttgaactatgatcaagtttttgttcgagattttgtacccagtgctctggcgtttctgatgaacggagagcctgatatagttaagaactttctcttgaagactctacaacttcaagggtgggagaaaagaatagatagattcaaactaggagaaggtgctatgccagctagcttcaaagttcttcatgaccctgtacgaaaatcagacacaattattgcagattttggagagagtgccattggaagagttgcaccagttgactctggattctggtggatcattctgctccgtgcatatacaaaatctactggggacttgtcgctagctgagacacctgagtgtcagaaaggaatgaggctcatactcactttgtgtctgtcagaaggatttgatacattcccaactctactttgtgctgatgggtgctctatgattgatcgaagaatgggtatttatggttatcctattgaaattcaagcacttttctttatggcgttgaggtgtgctttatcaatgctaaagcatgatgcggaaggaaaagaatgcattgaaagaatcgtgaaacgcttgcatgccttgagttatcacatgcgcagttacttttggcttgactttcaacaactaaatgatatctacagatataaaactgaggagtattctcacactgcagtaaataagttcaatgttattcctgattctatcccagactgggtatttgaatttatgccaacacgaggtggctactttattggcaatgttagtcctgcaaggatggatttccgatggttttgtttaggtaactgtatagcaatactatcttctcttgcaactccagagcaatcaatggctattatggaccttattgaagcccgctgggatgaacttgttggagaaatgctct

SEQ ID NO: 382 - protein, 426 aa, Gossypium hirsutum
  misc_feature (85)..(425): Pfam name: Invertase_neut Pfam desc: Plant neutral invertase
  misc_feature: Ceres Clone ID no. 1941767
  misc_feature: Bit score of 964.9 for HMM based on sequences of Figure 4
  misc_feature: Functional Homolog Of Ceres Annot ID no. 876994 at SEQ ID NO. 315
MEGTKEMGLRNVSSTCSINEMDDYDLSRLLDKPRLNIERQRSFDERSLSELSIGLTRAGLDNYETTYSPGGRSRSGFDTPASSTRNSFEPHPMVAEAWEALRRSLVYFRDQPVGTIAAYDHASEEVLNYDQVFVRDFVPSALAFLMNGEPDIVKNFLLKTLQLQGWEKRIDRFKLGEGAMPASFKVLHDPVRKSDTIIADFGESAIGRVAPVDSGFWWIILLRAYTKSTGDLSLAETPECQKGMRLILTLCLSEGFDTFPTLLCADGCSMIDRRMGIYGYPIEIQALFFMALRCALSMLKHDAEGKECIERIVKRLHALSYHMRSYFWLDFQQLNDIYRYKTEEYSHTAVNKFNVIPDSIPDWVFEFMPTRGGYFIGNVSPARMDFRWFCLGNCIAILSSLATPEQSMAIMDLIEARWDELVGEML

SEQ ID NO: 383 - DNA, 2169 bp, Populus balsamifera subsp. trichocarpa
  misc_feature: Ceres Annot ID no. 1444452
  misc_feature: Encodes the peptide sequence at SEQ ID NO. 384
atgtccaccacattgagagatcttctggtcgccgagagggaaaacgaggcttctccgcctccatttccaggtccgtcaacccgttattccgtttccggagatatttctgatgaagaagattcaacaaatacttcgccgcttttctcgtccgaggaagaacagtcaccagaaaacttgaagaaagtcactgcgcctgcagcttatttactggatcttaaactgaacgagaatcttgacaaagaagaattgaagaaatcatcggagtttataactcttgaacctgcaacgattgttgataaatcttttgaagaaagcgaaccttcgtattcttcagtgaaggaagttcttaaaacggcggagaaatctccattctctagtgatctaaaatgtaaacaattaagcgaggtttcttcagatttaaaaatcgagtctgtaactctaactgatttgactaaggagccttcagcttctttggaaaaagtaattgctaagtcagttgagaaatgcgaagcgaaaggagaggcaactgtgtcagaggaatcgacggtaattacttcgcgtgaggttgtgggaggtcggattccggagaaggatgaagcgacggtgacggtgcagagcaatgtgtgtgtatctgataatgccaagtcaacagcgttaaaacagtgtcctagtgtgggtgtgaagctggacgtcttggatttgaacatatctcaaagattgaacggtggagggcttctgatgagtccagaaagttgcacgatggtggatgaagcatgggagaggctcaacaagtcttatgtgtactttaaaggaaagcctgttgggactctagctgcaatggatactagtgctgatgcgttgaattacaaccaggtttttgtgagagattttgttcctaccggcttagcatgtctaatgaaggagcctccagaacctgagatcgtgaggaattttctgttgaagaccctccacctccagggtttagaaaaaagggttgataacttcactcttggagaaggtgtcttgcctgcaagttttaaggtcctctatgactctgatctggaaaaagaaaccttgcttgtggattttggtgccagtgcaatcggaagagtggcacctgttgattcaggtttctggtggataattcttcttaggtcctatatcaaacgcactcgtgattatgcactattagatcgcccggaggtacagaatggaatgaagctgatacttaaactttgcctttcggatggattcgacactttcccaactcttctatgtgcagatgggtgtagcatgattgaccggaggatgggaatatacgggtatccaattgaaatacaggcacttttctatttcgcactaaggtgtgcgaagcagatgttaaaaccagagctcgatggcaaggaatttattgagcgaattgagaagcgcatcacagctctcagctaccacattcagacatactattggctggatttcacacagctaaataacatataccgctacaaaaccgaggagtactcccacactgctgtcaataaatttaatgtcatcccagagtccattcctgattgggtgtttgatttcatgcctttgcgaggaggttacctgataggcaatgtcagcccagctcgcatggattttcgttggttcttagttgggaactgcgttgccattttgagctccctggttacacctgcacaggcgacagccattatggatttggtcgaggagcggtgggaagacttgattggagagatgcctttgaagatcacatatccagcactggagggacatgaatggaggctagtcactggatttgatcctaaaaacacaaggtggagttaccacaacggtggatcatggccaatgcttctatggttactttcagcagcgtgtattaaggttggaaggccacaaattgcaaaacgagcaatagagctggcggagcagcggctgtccaaagatgggtggcctgagtattatgatggtaagaccggcagatatgttgggaagcaagcaaggaaatatcagacctggagtattgctggctatttggttgctaaaatgatggtagaaaatccttccaatcttctaatgatatctcttgaagaggacaagaagagtgctaggtcaaggctcacccgctctaactcaacttccttttag

SEQ ID NO: 384 - protein, 722 aa, Populus balsamifera subsp. trichocarpa
  misc_feature (246)..(715): Pfam name: Invertase_neut Pfam desc: Plant neutral invertase
  misc_feature: Ceres Annot ID no. 1444452
  misc_feature: Bit score of 1170.4 for HMM based on sequences of Figure 4
  misc_feature: Functional Homolog Of Ceres Annot ID no. 876994 at SEQ ID NO. 315
MSTTLRDLLVAERENEASPPPFPGPSTRYSVSGDISDEEDSTNTSPLFSSEEEQSPENLKKVTAPAAYLLDLKLNENLDKEELKKSSEFITLEPATIVDKSFEESEPSYSSVKEVLKTAEKSPFSSDLKCKQLSEVSSDLKIESVTLTDLTKEPSASLEKVIAKSVEKCEAKGEATVSEESTVITSREVVGGRIPEKDEATVTVQSNVCVSDNAKSTALKQCPSVGVKLDVLDLNISQRLNGGGLLMSPESCTMVDEAWERLNKSYVYFKGKPVGTLAAMDTSADALNYNQVFVRDFVPTGLACLMKEPPEPEIVRNFLLKTLHLQGLEKRVDNFTLGEGVLPASFKVLYDSDLEKETLLVDFGASAIGRVAPVDSGFWWIILLRSYIKRTRDYALLDRPEVQNGMKLILKLCLSDGFDTFPTLLCADGCSMIDRRMGIYGYPIEIQALFYFALRCAKQMLKPELDGKEFIERIEKRITALSYHIQTYYWLDFTQLNNIYRYKTEEYSHTAVNKFNVIPESIPDWVFDFMPLRGGYLIGNVSPARMDFRWFLVGNCVAILSSLVTPAQATAIMDLVEERWEDLIGEMPLKITYPALEGHEWRLVTGFDPKNTRWSYHNGGSWPMLLWLLSAACIKVGRPQIAKRAIELAEQRLSKDGWPEYYDGKTGRYVGKQARKYQTWSIAGYLVAKMMVENPSNLLMISLEEDKKSARSRLTRSNSTSF

SEQ ID NO: 385 - protein, 560 aa, Oryza sativa subsp. japonica
  misc_feature (86)..(552): Pfam name: Invertase_neut Pfam desc: Plant neutral invertase
  misc_feature: Public GI ID no. 41053066
  misc_feature: Bit score of 1143.8 for HMM based on sequences of Figure 4
  misc_feature: Functional Homolog Of Ceres Annot ID no. 876994 at SEQ ID NO. 315
MVLYADPPPPIKPPEIKIKELANKSTYESSMMEQKTRLHAIERHRSCEVSQAILSEVENRHQHQTLEPIKSPISGCSPSVESTTDTNTVHRHTVADAAWEALKKSIVHFRGQPIGTVAAIDKSQGALNYDQVFMRDFVPSALAFLMKGEPTIVKNFLLETARLQLREKMVDLFKLGQGVMPASFKVHHCNSKHKTESLLADFGETAIGRVAPVDSGLWWIILLHAYTIWTRDNSLAESPECQRAMRLILKLCLSEGFDTSPALLCADGCSMIDRRMGIYGYPIDIQALFFMALRCAVTLLKEDHNDDFVYQISRRIKALSYHLHSYYWLDFQRLNEIYRYKTEEYSETALNKFNVIPESIPDWIFDFMPSRGGYFIGNVSPARMDFRWFCLGNFIAILSSLTTGEQAEAILDLVEERWEELIGEMPMKVCYPAMENQEWQIVTGCDPKNTRWSYHNGGSWPVLLWLLVAVSVKLGRPHIARRAVEVMEKRLVKDEFPEYYDGKAGRYVGKQARKFQTWSVAGYLVAKMLLDDPSNLRAVSLADDCHIRSAPVLKRSNSFP

SEQ ID NO: 386 - protein, 451 aa, Oryza sativa subsp. japonica
  misc_feature (74)..(451): Pfam name: Invertase_neut Pfam desc: Plant neutral invertase
  misc_feature: Public GI ID no. 108864059
  misc_feature: Bit score of 1042.3 for HMM based on sequences of Figure 4
  misc_feature: Functional Homolog Of Ceres Annot ID no. 876994 at SEQ ID NO. 315
MKRVSSHVSIASEAEINLDLSRLLIDKPRLTLERKRSFDEQSWSELSHRQNDGFDSIMHSPAFPSGFDSPFSLGTLGDPHPLVNEAWEALRKSVVYFRGQPVGTIAAVDHASEEVLNYDQVFVRDFFPSALAFLMNNETDIVKNFLLKTLHLQSSEKMVDRFKLGAGAMPASFKVDRNRNRNTETLVADFGESAIGRVAPVDSGFWWIILLRAYTKYTADTSLAESPECQNCMRLILNLCLSEGFDTFPTLLCTDGCSMIDRRMGIYGYPIEIQALFYMALRCALQMLKPDGEGKDFIEKIGQRLHALTYHMRNYFWLDFPHLNNIYRYKTEEYSHTAVNKFNVIPDSIPDWVFDFMPCRGGYFLGNVSPAMMDFRWFALGNCIAIISSLATPEQSVAIMDLIEERWEELVGEMPLKICYPAIENHEWRIITGCDPKNTRWSYHNGGSWPG

SEQ ID NO: 387 - protein, 646 aa, Vitis vinifera
  misc_feature (169)..(638): Pfam name: Invertase_neut Pfam desc: Plant neutral invertase
  misc_feature: Public GI ID no. 157327128
  misc_feature: Bit score of 1119.8 for HMM based on sequences of Figure 4
  misc_feature: Functional Homolog Of Ceres Annot ID no. 876994 at SEQ ID NO. 315
MPEKKPTSSDSASTLDAKKLNLLPAVKYLLKELDLEHVDLDNLPQMVEAESYSYPDVTETSEKPLDSPAEASGEKNEQSTENVSGGSGRSVPTLKESHSVGASLERYDQIREDKGVKKTDEPEKPLVFRSEVNEEKVVCTLKQPLNVETNIGNLDQNTSPGSRLSGHQVTGTEGASLVDEAWDRLQKSFVYFRGKPVGTLAAIDPSAEPLNYNQQVFVRDFVPSGLACLMKNPPEPEIVKNFLLQTLHLQGCQKKIDNYTLGEGVMPASFKVLHDPKTQKETLVADFGGSAIGRVAPVDSVFWWIILLRSYTKCTGDNSFSELPQVQGGIKSILKLCLCDGFNNFPTLLCADGCCMVDRSMGINGYPIEIQSLFYFALRCARQMLKPEHGGKEFFKRIDARITALSFHVQTYYWLDITQLNNIYRYKTEEYSHTAVNKFNIIPDSIPEWLFDFMPLRGGYFMGNVSPGRMDFRWFLAGNCIAILSSLATSEQATAIMDLVEERWEQLIGEVPLKVVYPALEGHYWELVTGCDPKNTPWSYHNGGSWPVLLWLLTAACIKIGRPQIAKRAIDLVEQRLSKDGWPEYYDGKTGRYVGKQARKFQTWSIAGYLVAKMMIENESNLLVISHEEEKKTNKLRHTRSASCFF

SEQ ID NO: 388 - protein, 504 aa, Vitis vinifera
  misc_feature (37)..(490): Pfam name: Invertase_neut Pfam desc: Plant neutral invertase
  misc_feature: Public GI ID no. 157343294
  misc_feature: Bit score of 1052.5 for HMM based on sequences of Figure 4
  misc_feature: Functional Homolog Of Ceres Annot ID no. 876994 at SEQ ID NO. 315
MAEDQSVVTNENFDSSEANDDKCTRTLDAAKTPHPRPTSFDQNLMFIEAWEHLRRSVVYYKGQAVGTMAALDNASGALNYDQVFVRDFVPSALAHLMKGELEIVKNFLLRTLHLQLSVKGIDRFALGQGLISAQSCEGHFGETAIGRVAGVDSGFWWIILLHAYTRATGDYSLSHRPECQNGMKLILSVCLAEGFDTFPTLLCADGCGMADRRMGVYGYPIEIQALFFMALRCAVHLLQEDDGKEFIMRIEKRLQALTYHMRSYFWLDFQQLNNIYRYKTEEYSHTAVNKFNVIPDSIPDWVFDFMPMKGGYFIANVSPARMDFRWFVLGNCVAILSSLATHNQSMAILDLIEERWGELVGKMPLKLSYPALDIHGWSIETGSDPKNTRWSYHNGGSWPGLLWLVTAACIKTGRPEIARKAIELAEQRLSKDDWQEYYDGKEGCYVGKQSRRLQTCSIAGYLVSKMLLEEPSHLGIIALEEDEKIKPTTITRSTTLPTKFRGYP

SEQ ID NO: 389 - protein, 532 aa, Oryza sativa subsp. japonica
  misc_feature (86)..(524): Pfam name: Invertase_neut Pfam desc: Plant neutral invertase
  misc_feature: Public GI ID no. 125580647
  misc_feature: Bit score of 1017.2 for HMM based on sequences of Figure 4
  misc_feature: Functional Homolog Of Ceres Annot ID no. 876994 at SEQ ID NO. 315
MVLYADPPPPIKPPEIKIKELANKSTYESSMMEQKTRLHAIERHRSCEVSQAILSEVENRHQHQTLEPIKSPISGCSPSVESTTDTNTVHRHTVADAAWEALKKSIVHFRGQPIGTVAAIDKSQGALNYDQVFMRDFVPSALAFLMKGEPTIVKNFLLETARLQLREKMVDLFKLGQGVMPASFKVHHCNSKHKTESLLADFGETAIGRVAPVDSGLWWIILLHAYTIWTRDNSLAESPECQRAMRLILKLCLSEGFDTSPALLCADGCSMIDRRMGIYGYPIDIQALFFMALRCAVTLLKEDHNDDFVYQISRRIKALSYHLHSYYWLDFQRLNEIYRYKTEEYSETALNKFNVIPESIPDWIFDFMPSRGGYFIGNAEAILDLVEERWEELIGEMPMKVCYPAMENQEWQIVTGCDPKNTRWSYHNGGSWPVLLWLLVAVSVKLGRPHIARRAVEVMEKRLVKDEFPEYYDGKAGRYVGKQARKFQTWSVAGYLVAKMLLDDPSNLRAVSLADDCHIRSAPVLKRSNSFP

SEQ ID NO: 390 - protein, 744 aa, Oryza sativa subsp. indica
  misc_feature (86)..(538): Pfam name: Invertase_neut Pfam desc: Plant neutral invertase
  misc_feature: Public GI ID no. 125537900
  misc_feature: Bit score of 1011.6 for HMM based on sequences of Figure 4
  misc_feature: Functional Homolog Of Ceres Annot ID no. 876994 at SEQ ID NO. 315
MVLYADPPPPIKPPEIKIKELANKSTYESSMMEQKTRLHAIERHRSCEVSQAILSEVENRHQHQTLEPIKSPISGCSPSVESTTDTNTVHRHTVADAAWEALKKSIVHFRGQPIGTVAAIDKSQGALNYDQVFMRDFVPSALAFLMKGEPTIVKNFLLETARLQLREKMVDLFKLGQGVMPASFKVHHCNSKHKTESLLADFGETAIGRVAPVDSGLWWIILLHAYTIWTRDNSLAESPECQRAMRLILKLCLSEGFDTSPALLCADGCSMIDRRMGIYGYPIDIQALFFMALRCAVTLLKEDHNDDFVYQISRRIKALSYHLHSYYWLDFQRLNEIYRYKTEEYSETALNKFNVIPESIPDWIFDFMPSRGGYFIGNVSPARMDFRWFCLGNFIAILSSLTTGEQAEAILDLVEERWEELIGEMPMKVCYPAMENQEWQIVTGCDPKNTRWSYHNGGSWPVLLWLLVAVSVKLGRPHIARRAVEVMEKRLVKDEFPEYYDGKAGRNQLSLTRRRLHPGPDLLTLSSPRLRAGLRLARAAAGEAPVETVEAPPSKPEAEPSPAASNGAAVKAEKPPAAAAAPPLPKFRDSRWVNGTWDLRQFEKGGAVDWDAVIDAEARRRKWLEDCPEATSPDEAVVFDTSIIPWWAWMKRFHLPEAEKLNGRAAMIGFFMAYFVDSLTGVGLVDQMGNFFCKTLLFVAVAGVLLVRKNEDIETVKKLIDETTFYDKQWQATWQDESPSQPKK

SEQ ID NO: 391 - protein, 909 aa, Oryza sativa subsp. indica
  misc_feature (74)..(451): Pfam name: Invertase_neut Pfam desc: Plant neutral invertase
  misc_feature (652)..(791): Pfam name: DUF1618 Pfam desc: Protein of unknown function (DUF1618)
  misc_feature: Public GI ID no. 125555130
  misc_feature: Bit score of 1042.2 for HMM based on sequences of Figure 4
  misc_feature: Functional Homolog Of Ceres Annot ID no. 876994 at SEQ ID NO. 315
MKRVSSHVSIASEAEINLDLSRLLIDKPRLTLERKRSFDEQSWSELSHRQNDGFDSIMHSPAFPSGFDSPFSLGTLGDPHPLVNEAWEALRKSVVYFRGQPVGTIAAVDHASEEVLNYDQVFVRDFFPSALAFLMNNETDIVKNFLLKTLHLQSSEKMVDRFKLGAGAMPASFKGIYGYPIEIQALFYMALRCALQMLKPDGEGKDFIEKIGQRLHALTYHMRNYFWLDFPHLNNIYRYKTEEYSHTAVNKFNVIPDSIPDWVFDFMPCRGGYFLGNVSPAMMDFRWFALGNCIAIISSLATPEQSVAIMDLIEERWEELVGEMPLKICYPAIENHEWRIITGCDPKNTRWSYHNGGSWPVLLWLLTAACIKTGRPQMAKRAIELAESRLLKDGWPEYYDGKLGRFIGKQARKFQTWSIAGYLVARMMLEDPSTLMMISMEEDRPVKPTMRRQDHRGGLPLLVRPSRPRLPPPRVATGGVGAKLPLLTVRRLRIRSSSLPALDVRRRCPRRLRAPRDALPEGRVPTIRDRLLLLQCRRRRRGPTTAAAVVVALPTYQGTNTKPPRLRGGSTGLLVRRCGDDDDDELVVAALLTEEYRRRDTLEGAELVVLRSGEWSATPIAPIVHDDGKGEELSYWETDMAVPVGDRLLCYVDLYRGVILCGDDLFDEIPPRLQYVSLPVEAPAGAFDEEHFDRQGDNYRRCLLNTRTVVCAIDGGGAALKFVDISSRCCCGSLGKHTTCDRSSRAFVIRTWTLRIDGDGDDDMAWTMDAMIDAAELGPSTPTPPSHGAFHYTPYTQAFKMNTMKIACVATSKLGGAPQLFLGGGWNGGGAASPAKSTTGAEVGRALPKPMRRAAVERTLRKTLIATISGDIDGNCSSSVSWATAAQAAEVARNDGSLVKFPHFFCSRV

SEQ ID NO: 392 - DNA, 2001 bp, Populus balsamifera subsp. trichocarpa
  misc_feature: Ceres Annot ID no. 1465440
  misc_feature: Encodes the peptide sequence at SEQ ID NO. 393
atggcaactacagaggcaatcctgcaagttctgtctggggctggtccttgcgtttttagctctgacccttgttttcgcagttcagatttgacattctcttctaaactccacataaaacgtgtaaagaaaagggcctcaaggtgtatgaaaatgttcgaatgttcgaatgttctgcagaatggtataggaaaccactggtttaagggattaggtgatagagatcggtctgtgaatgcaacgatcaacagattgcagcttctgaggtgcaaaggccctcaggcagaaagagttagtggtgtaactgaaggaggaaatggaacatggtttgtagatggtgcaaatacattaaaccagaatggggcggtgactggtgaacacactgactgttttggagcttgggatgctcagcagttgacacgggaaaaggagggttttgcatctaaagctgccctaaaccaggaaaaggagagtttggcaactaatggtgcggtaggaacaggtagagatgcctctcccaaggtcagtgtagatcctattgaggaagaagcatgggagctgctgcggaattctatggtttattattgtggcagtcctattggaacgattgctgccaatgatcctaccagttccagcgtgttaaattatgaccaggtcttcattagagacttcataccttctggcattgcttttcttttgaagggagaatatgatattgtccggaacttcctccttcatacacttcagttgcagagttgggagaaaacaatggactgtcacagtcctggacagggattgatgcctgctagtttcaaggtgcgcacggttcgtttggatggtgatgatgattttgcgacagaggaggtattggatcctgactttggagaggcagcaattggccgtgttgcaccagttgattctggattatggtggattattttattacgtgcatatgggaaatgctctggtgacctctcacttcaggagaggattgatgtgcagactggaattaagatgattctgaggctatgtcttgctgatggttttgatatgtttccaacattgttggtgacagatggttcttgcatgatagatcgccgaatgggaattcatgggcaccctctagaaatccaggcactcttttattccgccttactttgtgcaagggagatgcttgctccagaagatggatcagctgatctcatccgagctttgaacaatcgtctagtggctctttcattccatatcagagagtattattggattgatttaagaaaactaaatgagatttaccgttacaagaccgaagagtactcatatgatgcagtcaataagttcaacatttacccagatcagatttctccctggttggtggaatggatgcccaaccaaggaggctatcttattggaaacttgcaaccagctcatatggatttccgattcttttctcttggaaatatatggtccattgttagtggtcttgcaacaagagatcagtcaaatgcgatattggatttcattgaagccaagtggtctgatttgatagcagacatgccattgaagatctgttatcctgctcttgaaggtcaggagtggcagattatcactggaagtgatcctaagaacacgccttggtcctatcacaatgctggttcctggccaactcttctctggcagctgacagctgcatgcataaagatgaatagaccagaacttgctgcaagagcggtcgagattgctgagaaacgcatatcacgtgacaaatggcctgaatattatgacaccaaaaaagcaaggttcattggaaaacaagcacatctgttccagacatggtcaattgctgggtaccttgtggctaagctcttgcttgcagacccaagtgcagcccggatgctcgtgatggatgaggatcctgagcttgtcagcgccttctcctgcatgatcagtactcacccaaggagaaatcgtggacagaagaattcgaaaaagacattcatggtgtaa

SEQ ID NO: 393 - protein, 616 aa, Populus balsamifera subsp. trichocarpa
  misc_feature (121)..(594): Pfam name: Invertase_neut Pfam desc: Plant neutral invertase
  misc_feature: Ceres Annot ID no. 1465440
  misc_feature: Bit score of 1214.5 for HMM based on sequences of Figure 4
  misc_feature: Functional Homolog Of Ceres Annot ID no. 876994 at SEQ ID NO. 315
MFECSNVLQNGIGNHWFKGLGDRDRSVNATINRLQLLRCKGPQAERVSGVTEGGNGTWFVDGANTLNQNGAVTGEHTDCFGAWDAQQLTREKEGFASKAALNQEKESLATNGAVGTGRDASPKVSVDPIEEEAWELLRNSMVYYCGSPIGTIAANDPTSSSVLNYDQVFIRDFIPSGIAFLLKGEYDIVRNFLLHTLQLQSWEKTMDCHSPGQGLMPASFKVRTVRLDGDDDFATEEVLDPDFGEAAIGRVAPVDSGLWWIILLRAYGKCSGDLSLQERIDVQTGIKMILRLCLADGFDMFPTLLVTDGSCMIDRRMGIHGHPLEIQALFYSALLCAREMLAPEDGSADLIRALNNRLVALSFHIREYYWIDLRKLNEIYRYKTEEYSYDAVNKFNIYPDQISPWLVEWMPNQGGYLIGNLQPAHMDFRFFSLGNIWSIVSGLATRDQSNAILDFIEAKWSDLIADMPLKICYPALEGQEWQIITGSDPKNTPWSYHNAGSWPTLLWQLTAACIKMNRPELAARAVEIAEKRISRDKWPEYYDTKKARFIGKQAHLFQTWSIAGYLVAKLLLADPSAARMLVMDEDPELVSAFSCMISTHPRRNRGQKNSKKTFMV

SEQ ID NO: 394 - DNA, 1857 bp, Populus balsamifera subsp. trichocarpa
  misc_feature: Ceres Annot ID no. 1488320
  misc_feature: Encodes the peptide sequence at SEQ ID NO. 395
atggctacttcaaagacggttttacaagtcttatctggtggtttaccttgcccgcatcgttttgatctgtctttcggcggtttgaattccgtgctttcgatctgctctgatgtaaaacgtaggaagaatataggtttggtatacaaaaagttgaacaatgggatgaggttgttagggaaatgcaggagtcggggtgtaggtgctgtgacgtctcgtgggaaggtgaaatgtattgacaggtgggaatctatgaggtgcaaatgccaaaaggctgaaagttttggaggggcaactgcaaatgaatggagcccagtttcgcttcctgtaaatggcgttcacggtgccacgaatatttttgaaaagggaagttttgcattgaagggtaatgaagagacgcaatcgattgaggaagaagcatgggatttactccgtgcttcggttgtttgttactgtggtaatccaattggaacaattgctgcaaatgatccaaacagtactagcattctgaactatgatcaggtttttattcgtgacttcattccgtctggaatagctttccttttgaagggagagtatgatattgtgaggaatttcatcctgtacacccttcaactacagagttgggagaaaaccatggattgttatagccctggtcagggacttatgcctgccagttttaaggtgcgcactgttccccttgacagtgaggattctgctactgaagaggtattagatgctgactttggtgaagcagctattggccgagttgctccagttgattctggattgtggtggattatactgttacgagcttatggaaaatgctctggggatctttcagtgcaagagagagtcgatgtgcaaactgggatgaaaatgatcttaaggctgtgtcttgctgatggttttgacatgtttccaactttattggtgacagatggttcttgcatgatagatcgtcgcatgggaattcatggacatcccttggagattgaggcactcttttattcagcattactttgtgcacgtgagatgcttgctccagaggatggatcagctgacctcattagagctcttaacaatcgtctagttgccctttcattccacatcagggaatattactggatagatttgaaaaaactgaatgaaatataccgttataccacagaggaatactcttatgatgcagttaataagtttaatatctatccagatcagattcctccctggctggttgaattcatgcccaacaaaggaggttatttgattggaaatctgcaaccagctcacatggatttccgtttctttactcttggaaacttatggtctattgtaagtagtcttgcaacattggatcagtcccatgccatcctggatcttattgaagcaaaatgggcagaattagtggcggaaatgccaatcaaaatatgctatcctgctcttgaaggccaggaatggaggatcgtcactggcagcgatcccaagaacacagcctggtcttatcacaatggaggatcttggccaactttgctttggcagcttactgtagcatgcataaagatgaatagaccagagattgctgaaagagcagttcagcttgttgagaggcgcatatccagagacaagtggccagaatactatgacactaagcgagcaagatttattggaaaacaggcacacttatttcaaacctggtcgatttcaggttacctcgtggcaaaactcttccttgccaaccctagtgcagcaaagattttcgtaaatgaagaggatccagagcttgtaaatgctttgattagtgccaacccaaggaggaaacgtgctaggaaaatcttcaagcagcccttcattgtatga

SEQ ID NO: 395 - protein, 618 aa, Populus balsamifera subsp. trichocarpa
  misc_feature (127)..(599): Pfam name: Invertase_neut Pfam desc: Plant neutral invertase
  misc_feature: Ceres Annot ID no. 1488320
  misc_feature: Bit score of 1218.8 for HMM based on sequences of Figure 4
  misc_feature: Functional Homolog Of Ceres Annot ID no. 876994 at SEQ ID NO. 315
MATSKTVLQVLSGGLPCPHRFDLSFGGLNSVLSICSDVKRRKNIGLVYKKLNNGMRLLGKCRSRGVGAVTSRGKVKCIDRWESMRCKCQKAESFGGATANEWSPVSLPVNGVHGATNIFEKGSFALKGNEETQSIEEEAWDLLRASVVCYCGNPIGTIAANDPNSTSILNYDQVFIRDFIPSGIAFLLKGEYDIVRNFILYTLQLQSWEKTMDCYSPGQGLMPASFKVRTVPLDSEDSATEEVLDADFGEAAIGRVAPVDSGLWWIILLRAYGKCSGDLSVQERVDVQTGMKMILRLCLADGFDMFPTLLVTDGSCMIDRRMGIHGHPLEIEALFYSALLCAREMLAPEDGSADLIRALNNRLVALSFHIREYYWIDLKKLNEIYRYTTEEYSYDAVNKFNIYPDQIPPWLVEFMPNKGGYLIGNLQPAHMDFRFFTLGNLWSIVSSLATLDQSHAILDLIEAKWAELVAEMPIKICYPALEGQEWRIVTGSDPKNTAWSYHNGGSWPTLLWQLTVACIKMNRPEIAERAVQLVERRISRDKWPEYYDTKRARFIGKQAHLFQTWSISGYLVAKLFLANPSAAKIFVNEEDPELVNALISANPRRKRARKIFKQPFIV

SEQ ID NO: 396 - DNA, 1992 bp, Populus balsamifera subsp. trichocarpa
  misc_feature: Ceres Annot ID no. 1510995
  misc_feature: Encodes the peptide sequence at SEQ ID NO. 397
atggcgacttcggatgcagttctgcaagttttgtctggggctggtcctcgcagtttcagttctgacctttgttttaacaatttagatttggcattccgttctaagcatataaaatatgtaaagaaaagggcctcaaggcatatgaaaatgctcgagtgttcgagtgttcagcagaattgtataggaaaacattggtttaagagatcaggtgacggtgatctgtctgtgaatgcaacgatcaagagactgcagcttctgaggtgcaaatgccagaaggcagaaagagttagtggtgtaactacagaaggaggaaatggaacatggtttgtagatagtgcaaagacgttaaacctgaatggggcggtgaacacaccgggtgtattggagcttggggacactcaacagttgatgcgggaaaaggaggttttgacatctaatggttcagcaaataaggaagaggagagtttggcaactaatggtgctgtaggaacaggtagagatgcctctcgcaaggttagtgtagaccctactgaggaagaagcatgggagctactgcgggattctgtagttcattattgtggcagtccaattggaacgattgctgccaatgatcccaccagttccagtgtgttgaattatgaccaggtcttcattagagacttcataccttctggtattgcttttcttttgaagggagaatatgatattgtccggaacttcctccttcatacgcttcagttgcagagttgggagaaaacaatggactgtcacagtcctggacagggattaatgcctgctagtttcaaggtgcgcacttttcctttggatggtgatgattctgcaacagaggaggtattggatcctgactttggagaggcagcaattggccgtgttgcaccagttgattctggattatggtggattatcttgttacgtgcatatgggaaatgctctggtgatctctcagttcaggagaggatcgatgtgcaaactggaattaagatgattctgaggttatgtcttgctgatggttttgacatgttcccaacattgttggtgacagatggttcttgcatgatagatcgcagaatgggaattcatgggcaccctctagaaatccaggcactcttttattccgccttactttgtgcaaaggagatgctcgccccagaggatggatcagctgatctcttacgagctttgaacaatcgtctagtagctctgtcgttccatatcagagagtattactggatcgatttaagaaaattaaatgaaatttaccgttacaagactgaagagtactcttatgatgcagttaataagttcaacatttacccagatcaggtttctccttggttggtggaatggatgcccaaccaaggaggctaccttattggaaacttgcaaccagctcatatggatttccgattcttttctcttggaaacatatggtctgttgtaagtggtcttgcaacaagagatcagtcaaatgcgatattggatctcattgaagccaagtggtcagatttggtagcagacatgccattgaagatttgctatccagctcttgaaggtcaggagtggcaaattatcactggaagtgatcctaagaacacgccttggtcttaccacaatgcaggttcctggccaactcttctgtggcagctgacagttgcatgcataaagatgaatagaccagaaatagcagcaagagcagtcgatattgctgagaaacgcatatcaagagacaaatggcctgaatattatgacaccaaaaaggcaaggttcattggaaaacaagcacgcctgttccagacatggtccattgctggataccttgtggctaagctcttgcttgcagacccaagtgcagccaggatgctcgtaactgatgaagatcctgagcttgtcaatgccttctcctgcatgatcagttctaatccaaggagaaagcgtggtcagaagaattcgaaaaagccattcatagtatga

SEQ ID NO: 397 - protein, 614 aa, Populus balsamifera subsp. trichocarpa
  misc_feature (120)..(592): Pfam name: Invertase_neut Pfam desc: Plant neutral invertase
  misc_feature: Ceres Annot ID no. 1510995
  misc_feature: Bit score of 1225.9 for HMM based on sequences of Figure 4
  misc_feature: Functional Homolog Of Ceres Annot ID no. 876994 at SEQ ID NO. 315
MLECSSVQQNCIGKHWFKRSGDGDLSVNATIKRLQLLRCKCQKAERVSGVTTEGGNGTWFVDSAKTLNLNGAVNTPGVLELGDTQQLMREKEVLTSNGSANKEEESLATNGAVGTGRDASRKVSVDPTEEEAWELLRDSVVHYCGSPIGTIAANDPTSSSVLNYDQVFIRDFIPSGIAFLLKGEYDIVRNFLLHTLQLQSWEKTMDCHSPGQGLMPASFKVRTFPLDGDDSATEEVLDPDFGEAAIGRVAPVDSGLWWIILLRAYGKCSGDLSVQERIDVQTGIKMILRLCLADGFDMFPTLLVTDGSCMIDRRMGIHGHPLEIQALFYSALLCAKEMLAPEDGSADLLRALNNRLVALSFHIREYYWIDLRKLNEIYRYKTEEYSYDAVNKFNIYPDQVSPWLVEWMPNQGGYLIGNLQPAHMDFRFFSLGNIWSVVSGLATRDQSNAILDLIEAKWSDLVADMPLKICYPALEGQEWQIITGSDPKNTPWSYHNAGSWPTLLWQLTVACIKMNRPEIAARAVDIAEKRISRDKWPEYYDTKKARFIGKQARLFQTWSIAGYLVAKLLLADPSAARMLVTDEDPELVNAFSCMISSNPRRKRGQKNSKKPFIV

SEQ ID NO: 398 - protein, 634 aa, Ipomoea trifida
  misc_feature (140)..(611): Pfam name: Invertase_neut Pfam desc: Plant neutral invertase
  misc_feature: Public GI ID no. 45935151
  misc_feature: Bit score of 1218.5 for HMM based on sequences of Figure 4
  misc_feature: Functional Homolog Of Ceres Annot ID no. 876994 at SEQ ID NO. 315
MHLIANSTIQHTPSNPHMQATLLSFEVSSRAPIGIFYTSQLDHLKVKGKNSRVKCFKDLGTITSSSKLCAVRDFYGLEKPNLLRCYCQPAERGNERIFEDEQGRSVHSIAPNGQTSDAAQQFKNDNGTVPSSKTVNNALPKSSTNSIEEEAWNLLRASMVYYCGNPIGTIAANDPSDSSILNYDQVFIRDFIPSGIAFLLKGEYDIVRNFLLHTLQLQSWEKTMDCYSPGQGLMPASFKVRTVPLDNDENATEDVLDPDFGEAAIGRVAPVDSGLWWIILLRAYGKCSGDLSLLERIDVQTGMKMILKLCLADGFDMFPTLLVTDGSCMIDRRMGIHGHPLEIQALFYSALLCAREMLAPEEASIDLITALNNRLLALSFHIREYYWIDVKKLNEIYRYKTEEYSYEAINKFNIYPDQIPPWLVEWMPSKGGYLIGNLQPAHMDFRFFSLGNLWSIVSSLATTDQSHAILDLIETKWEDLVANMPLKICYPALEGQEWRIITGGDPKNTPWSYHNAGSWPTLLWQLAVACVKMKRPEIAENAIKVAERRIAGDKWPEYYDTKRGGFIGKQARLFQTWSIAGYLVAKLLVANPEAAKMLITIEDTELLSAFSSILSSNPRRKRSRKGAVKQSYIV

SEQ ID NO: 399 - protein, 651 aa, Vitis vinifera
  misc_feature (157)..(629): Pfam name: Invertase_neut Pfam desc: Plant neutral invertase
  misc_feature: Public GI ID no. 157353979
  misc_feature: Bit score of 1225.8 for HMM based on sequences of Figure 4
  misc_feature: Functional Homolog Of Ceres Annot ID no. 876994 at SEQ ID NO. 315
MAMGTSEAVLQVFSGAVPCLFGSDPCFSKSDSMSPFKSHIKSVKKRGSRYMLKCSYMIRSHIMTHRLHGVGGGLYGNTSIHRSQLQSCKCQRADSVSGIASEAGNGTWFVDNAKKRNPINGVMDTPNVLEFQDVQELKPEMEGSISNGAVETARDTFVKVRVDSIEDEAWDLLRESMVYYCGSPIGTIAAKDPTSSNVLNYDQVFIRDFIPSGIAFLLKGEYDIVRNFILHTLQLQSWEKTMDCHSPGQGLMPASFKVRTVPLDGDDSATEEVLDPDFGEAAIGRVAPVDSGLWWIILLRAYGKCSGDLSVQERIDVQTGIKMILRLCLADGFDMFPTLLVTDGSCMIDRRMGIHGHPLEIQALFYSALLCAREMLAPEDGSADLIRALNNRLVALSFHIREYYWIDMKKLNEIYRYKTEEYSYDAVNKFNIYPDQISPWLVEWMPNKGGYLIGNLQPAHMDFRFFSLGNLWSIISSLATMDQSHAILDLVEAKWGDLVADMPLKICYPALEGQEWQIITGSDPKNTPWSYHNAGSWPTLLWQLTVACIKMDRPQIAAKAVEIAERRIARDKWPEYYDTKKARFIGKQACLFQTWSIAGYLVAKLLLSDPTAAKILITEEDSELVNAFSCMISANPRRKRGRKSSTQTFIV

SEQ ID NO: 400 - protein, 621 aa, Oryza sativa subsp. indica
  misc_feature (128)..(600): Pfam name: Invertase_neut Pfam desc: Plant neutral invertase
  misc_feature (182)..(573): Pfam name: GDE_C Pfam desc: Amylo-alpha-1,6-glucosidase
  misc_feature: Public GI ID no. 125525725
  misc_feature: Bit score of 1309.3 for HMM based on sequences of Figure 4
  misc_feature: Functional Homolog Of Ceres Annot ID no. 876994 at SEQ ID NO. 315
MGLAAAAAAAVRPCRRRLLSSATAAAAATVATATPLFPRCPHPHHHLHGRRLPFLASAASQQQQQSGQTAASPATPPIPSDPRAAVSGNLPFFDRVLFPDTFPVETPPPSSAAASAAAAADEEVASALKVREETEAEREAWRLLRRAVVSYCGEPVGTVAAEDPECTETLNYDQVFIRDFVPSALAFLMRGETEIVRNFLLHTLQLQSWEKTVDCYSPGQGLMPASFKIRAVPLDDNNEAFEEVLDPDFGESAIGRVAPVDSGLWWIILLRAYCKITGDNALQERVDVQTGIKLILSLCLSDGFDMFPTLLVTDGSCMIDRRMGIHGHPLEIQALFYSALRCSREMLVMNDGSKNLLRAINNRLSALSFHIREYYWVDMKKINEIYRYKTEEYSHDATNKFNIYPEQIPSWLVDWIPEKGGYLIGNLQPAHMDFRFFSLGNLWAITSSLTTPKQAEGILSLIDEKWDDLIANMPLKICYPAMEDDEWRIITGSDPKNTPWSYHNGGSWPTLLWQFTLACIKMGRPELARRAIAVAEEKLAADKWPEYYDTRSGRFIGKQSRSYQTWTIAGFLTSKMLLENPELASILTCNEDLELLEGCACCLSKKRTRCSRRAAKSHVVE

SEQ ID NO: 401 - protein, 628 aa, Oryza sativa subsp. japonica
  misc_feature (135)..(607): Pfam name: Invertase_neut Pfam desc: Plant neutral invertase
  misc_feature (189)..(580): Pfam name: GDE_C Pfam desc: Amylo-alpha-1,6-glucosidase
  misc_feature: Public GI ID no. 115436346
  misc_feature: Bit score of 1313.0 for HMM based on sequences of Figure 4
  misc_feature: Functional Homolog Of Ceres Annot ID no. 876994 at SEQ ID NO. 315
MNGQTPMGLAAAAAAAVRPCRRRLLSSATAAAAAATVATATPLFPRCPHPHHHLHGRRLPFLASAASQQQQQSGQTAASPATPPIPSDPRAAVSGNLPFFDRVLFPDTFPVETPPPSSAAASAAAAADEEVASALKAREETEAEREAWRLLRRAVVSYCGEPVGTVAAEDPECTETLNYDQVFIRDFVPSALAFLMRGETEIVRNFLLHTLQLQSWEKTVDCYSPGQGLMPASFKIRAVPLDDNNEAFEEVLDPDFGESAIGRVAPVDSGLWWIILLRAYCKITGDNALQERVDVQTGIKLILSLCLSDGFDMFPTLLVTDGSCMIDRRMGIHGHPLEIQALFYSALRCSREMLVMNDGSKNLLRAINNRLSALSFHIREYYWVDMKKINEIYRYKTEEYSHDATNKFNIYPEQIPSWLVDWIPEKGGYLIGNLQPAHMDFRFFSLGNLWAITSSLTTPKQAEGILSLIDEKWDDLIANMPLKICYPAMEDDEWRIITGSDPKNTPWSYHNGGSWPTLLWQFTLACIKMGRPELARRAIAVAEEKLAADKWPEYYDTRSGRFIGKQSRSYQTWTIAGFLTSKMLLENPELASILTCDEDLELLEGCACCLSKKRTRCSRRAAKSHVVE

SEQ ID NO: 402 - DNA, 1884 bp, Sorghum bicolor
  misc_feature: Ceres Annot ID no. 6096803
  misc_feature: Encodes the peptide sequence at SEQ ID NO. 403
atgagtggtcaaaccccgatggggctcgccgccgcagcagccgcagcagtgaggccgtgccgccgacgcctcctctcgtccgcctccgcagcctcggcgtcaaagacggcggcgggcaccgcgacccggctcttccccaggttgccccacccgcaccacccgccgtacggccggcgcctccccttcctcgtctccgcggcgtcgcagtcgcaggcctcgcagaccggcccggccacccctgtaccggtccccgtcgcctccgacccccgcgccgccgtttccggcaacctccctttcttcgaccgcgtcctcttcccggactcgttcccgcttgataccccgcctgccaaggaggaggacgacgcggcggcggtgcaggccgatgaggcggtggagccgcccgcgcccttgagggaggagacggagacggagagggaggcgtggaggctgctacggcgggcggtcgtcagctactgcggcgagcctgtggggacggttgcggcggaggaccccgagtgcacggagacgctcaactacgaccaggtcttcatcagggacttcgtgccctccgctctcgccttcctcatgcgcggcgagaccgagatcgtccgcaacttcctcctccacaccctccagcttcagagctgggagaaaactgttgattgttacagccctgggcaaggattgatgccagctagcttcaagattaggaccgtaccacttgatgagaacaatgaaggatttgaggaggtcttggaccctgacttcggtgaggcagccattggccgtgtagctccggtggattctggactgtggtggattattttgttgagagcttactgcaagattacaggagacaatgctttgctagaaagagttgatgtgcagacaggaattcaattgatactgagtttgtgtttggctgatgggtttgacatgttcccaacgttactagttacagatggatcatgcatgatagacaggaggatgggaatacatgggcatcctcttgaaatccaagctttgttctactctgctttacgatgctcacgagaaatgcttgttatgaacaatggatcgaaaaacctcattcgtgccattaacaacaggctcagtgcattgtcctttcacatcagagaatattactgggttgacatgaagaagataaatgagatatacagatacaagacagaagaatactcccatgatgccactaacaaattcaacatttaccctgagcaaatcccttcctggcttgttgactggattcctgagaaaggaggttaccttatagggaatctgcagccagctcacatggattttaggttcttctctcttggcaacctttgggccatagcttcgtctctaactactccaaaacaagctgagggaattcttagccttattgatgaaaaatgggatgatcttgtagcaaacatgcccctcaagatatgctatcctgcaatggaagatgatgaatggcgcattattactggcagtgatcctaagaataccccatggtcatatcataatggtggatcttggccaaccctattgtggcagttcacgttggcgtgcataaaaatgggtagaccagaattggcccggagagccattgcagtggccgaggagagactctcagatgacaagtggccagaatactacgacacccgatctgggaggttcattgggaagcaatcccgatcttaccagacatggactattgctggttttctgacctcaaaaatgttgctggagaacccagagctggcttcaattctgacctgtgatgaggaccttgagctgctcgaaggctgcgcttgctgcctgtccacgaagaggaccaggtgctcacgccgggcagccaagtcacatattgggtga

SEQ ID NO: 403 - protein, 627 aa, Sorghum bicolor
  misc_feature (135)..(607): Pfam name: Invertase_neut Pfam desc: Plant neutral invertase
  misc_feature (189)..(580): Pfam name: GDE_C Pfam desc: Amylo-alpha-1,6-glucosidase
  misc_feature: Ceres Annot ID no. 6096803
  misc_feature: Bit score of 1319.8 for HMM based on sequences of Figure 4
  misc_feature: Functional Homolog Of Ceres Annot ID no. 876994 at SEQ ID NO. 315
MSGQTPMGLAAAAAAAVRPCRRRLLSSASAASASKTAAGTATRLFPRLPHPHHPPYGRRLPFLVSAASQSQASQTGPATPVPVPVASDPRAAVSGNLPFFDRVLFPDSFPLDTPPAKEEDDAAAVQADEAVEPPAPLREETETEREAWRLLRRAVVSYCGEPVGTVAAEDPECTETLNYDQVFIRDFVPSALAFLMRGETEIVRNFLLHTLQLQSWEKTVDCYSPGQGLMPASFKIRTVPLDENNEGFEEVLDPDFGEAAIGRVAPVDSGLWWIILLRAYCKITGDNALLERVDVQTGIQLILSLCLADGFDMFPTLLVTDGSCMIDRRMGIHGHPLEIQALFYSALRCSREMLVMNNGSKNLIRAINNRLSALSFHIREYYWVDMKKINEIYRYKTEEYSHDATNKFNIYPEQIPSWLVDWIPEKGGYLIGNLQPAHMDFRFFSLGNLWAIASSLTTPKQAEGILSLIDEKWDDLVANMPLKICYPAMEDDEWRIITGSDPKNTPWSYHNGGSWPTLLWQFTLACIKMGRPELARRAIAVAEERLSDDKWPEYYDTRSGRFIGKQSRSYQTWTIAGFLTSKMLLENPELASILTCDEDLELLEGCACCLSTKRTRCSRRAAKSHIG

SEQ ID NO: 404 - DNA, 2079 bp, Populus balsamifera subsp. trichocarpa
  misc_feature: Ceres Annot ID no. 1511927
  misc_feature: Encodes the peptide sequence at SEQ ID NO. 405
atgaacagtagtagttgtattggtatctcaacaatgaaaccctgttgcagaatcataattagttaccgaagtttttcacattttggggtttctctctcaagatctaataataattcagtcattcataccaatttgtcgaaatcacacccgaaatcggtatataatcatgaattccactgctgtaataaccgtagttggtcacaagatacgggtcataaatgtatagttaatctggatcgcagaggttttaatgtctgcgattggaattggggtcatgctaggggttttagttcaggttttcttgtcgataagggtagtagttcaaggggtgttttagtaattcccaaagtagcgtcagacattaggaatcattcgacttcggtagagggtcatgttaatacgaaaggatttgagagtatttacattcaaggagggttgaatgtgaagcctttagtgatagaaaagattgaaacagaaagtgatgtagctaaagaaggaaaagaggaaacatctagtaatagggtggagattaatggatccgaagtaaatacaaacttcttcaagggtttgaatgagagcacaactcctaaggttgttgagagagaggtgtctaagatcgagaaggaagcgtggcagttgcttcgaggcaccattgtgaattactgtgggaatccagtagggactgtcgctgctaatgatcctgccgacaggcaaccgttgaattatgaccaagtcttcattcgtgattttgttccatccgcacttgcttttttgcttaatggagaaatggagattgtgaagaattttcttcttcacactttgcagttgcagagctgggagaaaacagtggactgttacagtcctgggcaagggttaatgccagcaagttttaaagttaaaacagtgcctcttgatggtagtgatggaggttttgaggaggttttggatcctgattttggtgaatcggccattgggcgtgttgcgcctgttgattctgggctgtggtggataattttgttgagagcttatgggaagataacaggcgactatgcattgcaagagagggttgatgtccagacaggaatcagactcggactaaatttgtgtttatcagatgggtttgatatgtttcctacgctgttagtcactgatggttcctgcatgattgatagacggatgggtatccatggacaccctcttgaaatccaagccttgttctattctgctttgcgatgtgctcgtgagatgctcatagtcaatgatgaaaccaagaatctggtggctgcaataaataatcgactcagtgcactctcattccatatcagagagtattattgggtggacatgaggaagatcaatgagatctaccgttacaacactgaagaatactctacagatgcagtcaacaagttcaacatataccccgatcaaattccttcatggctagtggattggattcctgaggaaggtggttacctcattggcaatctacagccggctcacatggattttaggttttttactcttgggaacctttgggccatcgtctcttctctgggaacctcaaaacaaaatgagggtatcctaaatttgatcgaggccaggtgggatgatctcatgggccatatgcctcttaagatttgttaccctgctttggaatatgaagaatggcgcataattactggcagtgatccaaagaacaccccatggtcatatcacaatggtggatcttggccaacactgctgtggcagttcacattagcttgtatcaagatggggaaaccagaattagcacaaaaggcaattgctttggcagagacgagattatcaatggatcaatggcctgaatactatgacactcgcagtggaaggtttataggcaaacagtccaggctttttcagacatggacaatctctggttttctaacatcaaagatgcttttagagaatccagataaagcatccttgttgttcttggaagaggattatgagctcctggagatatgtgtttgtgcactaagcaaaactggccggaagaagtgctcacgctttgctgcaagatctcaaattcttgtctga

SEQ ID NO: 405 - protein, 681 aa, Populus balsamifera subsp. trichocarpa
  misc_feature (187)..(659): Pfam name: Invertase_neut Pfam desc: Plant neutral invertase
  misc_feature (229)..(632): Pfam name: GDE_C Pfam desc: Amylo-alpha-1,6-glucosidase
  misc_feature: Ceres Annot ID no. 1511927
  misc_feature: Bit score of 1274.9 for HMM based on sequences of Figure 4
  misc_feature: Functional Homolog Of Ceres Annot ID no. 876994 at SEQ ID NO. 315
MKPCCRIIISYRSFSHFGVSLSRSNNNSVIHTNLSKSHPKSVYNHEFHCCNNRSWSQDTGHKCIVNLDRRGFNVCDWNWGHARGFSSGFLVDKGSSSRGVLVIPKVASDIRNHSTSVEGHVNTKGFESIYIQGGLNVKPLVIEKIETESDVAKEGKEETSSNRVEINGSEVNTNFFKGLNESTTPKVVEREVSKIEKEAWQLLRGTIVNYCGNPVGTVAANDPADRQPLNYDQVFIRDFVPSALAFLLNGEMEIVKNFLLHTLQLQSWEKTVDCYSPGQGLMPASFKVKTVPLDGSDGGFEEVLDPDFGESAIGRVAPVDSGLWWIILLRAYGKITGDYALQERVDVQTGIRLGLNLCLSDGFDMFPTLLVTDGSCMIDRRMGIHGHPLEIQALFYSALRCAREMLIVNDETKNLVAAINNRLSALSFHIREYYWVDMRKINEIYRYNTEEYSTDAVNKFNIYPDQIPSWLVDWIPEEGGYLIGNLQPAHMDFRFFTLGNLWAIVSSLGTSKQNEGILNLIEARWDDLMGHMPLKICYPALEYEEWRIITGSDPKNTPWSYHNGGSWPTLLWQFTLACIKMGKPELAQKAIALAETRLSMDQWPEYYDTRSGRFIGKQSRLFQTWTISGFLTSKMLLENPDKASLLFLEEDYELLEICVCALSKTGRKKCSRFAARSQILV

SEQ ID NO: 406 - DNA, 1938 bp, Populus balsamifera subsp. trichocarpa
  misc_feature: Ceres Annot ID no. 1458667
  misc_feature: Encodes the peptide sequence at SEQ ID NO. 407
atgacattttggaaaaatgcgaaggctattcgtgtaacatcatctaaaagatccagaagcacgagcagggatattattgtaataacataccacgtaggccccgcactcaggaagggggaatttccttcaactcctctatataaacccagctggggttttcttgtcgataagggtagtagttcaaggggtgttttagtaattcccaaagtagcgtcagacattaggaatcattcgacttcggtagagggtcatgttaatacgaaaggatttgagagtatttacattcaaggagggttgaatgtgaagcctttagtgatagaaaagattgaaacagaaagtgatgtagctaaagaaggaaaagaggaaacatctagtaatagggtggagattaatggatccgaagtaaatacaaacttcttcaagggtttgaatgagagcacaactcctaaggttgttgagagagaggtgtctaagatcgagaaggaagcgtggcagttgcttcgaggcaccattgtgaattactgtgggaatccagtagggactgtcgctgctaatgatcctgccgacaggcaaccgttgaattatgaccaagtcttcattcgtgattttgttccatccgcacttgcttttttgcttaatggagaaatggagattgtgaagaattttcttcttcacactttgcagttgcagagctgggagaaaacagtggactgttacagtcctgggcaagggttaatgccagcaagttttaaagttaaaacagtgcctcttgatggtagtgatggaggttttgaggaggttttggatcctgattttggtgaatcggccattgggcgtgttgcgcctgttgattctgggctgtggtggataattttgttgagagcttatgggaagataacaggcgactatgcattgcaagagagggttgatgtccagacaggaatcagactcggactaaatttgtgtttatcagatgggtttgatatgtttcctacgctgttagtcactgatggttcctgcatgattgatagacggatgggtatccatggacaccctcttgaaatccaagccttgttctattctgctttgcgatgtgctcgtgagatgctcatagtcaatgatgaaaccaagaatctggtggctgcaataaataatcgactcagtgcactctcattccatatcagagagtattattgggtggacatgaggaagatcaatgagatctaccgttacaacactgaagaatactctacagatgcagtcaacaagttcaacatataccccgatcaaattccttcatggctagtggattggattcctgaggaaggtggttacctcattggcaatctacagccggctcacatggattttaggttttttactcttgggaacctttgggccatcgtctcttctctgggaacctcaaaacaaaatgagggtatcctaaatttgatcgaggccaggtgggatgatctcatgggccatatgcctcttaagatttgttaccctgctttggaatatgaagaatggcgcataattactggcagtgatccaaagaacaccccatggtcatatcacaatggtggatcttggccaacactgctgtggcagttcacattagcttgtatcaagatggggaaaccagaattagcacaaaaggcaattgctttggcagagacgagattatcaatggatcaatggcctgaatactatgacactcgcagtggaaggtttataggcaaacagtccaggctttttcagacatggacaatctctggttttctaacatcaaagatgcttttagagaatccagataaagcatccttgttgttcttggaagaggattatgagctcctggagatatgtgtttgtgcactaagcaaaactggccggaagaagtgctcacgctttgctgcaagatctcaaattcttgtctga

SEQ ID NO: 407 - protein, 645 aa, Populus balsamifera subsp. trichocarpa
  misc_feature (151)..(623): Pfam name: Invertase_neut Pfam desc: Plant neutral invertase
  misc_feature (193)..(596): Pfam name: GDE_C Pfam desc: Amylo-alpha-1,6-glucosidase
  misc_feature: Ceres Annot ID no. 1458667
  misc_feature: Bit score of 1269.1 for HMM based on sequences of Figure 4
  misc_feature: Functional Homolog Of Ceres Annot ID no. 876994 at SEQ ID NO. 315
MTFWKNAKAIRVTSSKRSRSTSRDIIVITYHVGPALRKGEFPSTPLYKPSWGFLVDKGSSSRGVLVIPKVASDIRNHSTSVEGHVNTKGFESIYIQGGLNVKPLVIEKIETESDVAKEGKEETSSNRVEINGSEVNTNFFKGLNESTTPKVVEREVSKIEKEAWQLLRGTIVNYCGNPVGTVAANDPADRQPLNYDQVFIRDFVPSALAFLLNGEMEIVKNFLLHTLQLQSWEKTVDCYSPGQGLMPASFKVKTVPLDGSDGGFEEVLDPDFGESAIGRVAPVDSGLWWIILLRAYGKITGDYALQERVDVQTGIRLGLNLCLSDGFDMFPTLLVTDGSCMIDRRMGIHGHPLEIQALFYSALRCAREMLIVNDETKNLVAAINNRLSALSFHIREYYWVDMRKINEIYRYNTEEYSTDAVNKFNIYPDQIPSWLVDWIPEEGGYLIGNLQPAHMDFRFFTLGNLWAIVSSLGTSKQNEGILNLIEARWDDLMGHMPLKICYPALEYEEWRIITGSDPKNTPWSYHNGGSWPTLLWQFTLACIKMGKPELAQKAIALAETRLSMDQWPEYYDTRSGRFIGKQSRLFQTWTISGFLTSKMLLENPDKASLLFLEEDYELLEICVCALSKTGRKKCSRFAARSQILV

SEQ ID NO: 408 - protein, 639 aa, Vitis vinifera
  misc_feature (147)..(617): Pfam name: Invertase_neut Pfam desc: Plant neutral invertase
  misc_feature: Public GI ID no. 157346594
  misc_feature: Bit score of 1216.2 for HMM based on sequences of Figure 4
  misc_feature: Functional Homolog Of Ceres Annot ID no. 876994 at SEQ ID NO. 315
MGTSEAVLPSLSTAVPHLSHSKPCLNSLNSMLHLKSGINSRRKRALGYMRLLNCSRMLRNCRRVYSIQGIDGFSHGKTKISRLESVSCKGQQAESVSGITAEDGHGTIIAPKIKEFEMVEPMRHEKGGFASNGKFAAGGTINDTLGKASIDSIEDEAWNLLRESIVFYCGYPIGTIAANDPSNSSSLNYDQVFIRDFIPSGIAFLLKGEYDIVRSFILHTLQLQSWEKTMDCHSPGQGLMPASFKVRTVPLDGDDSATEDVLDPDFGEAAIGRVAPVDSGLWWIILLRAYGKCSGDLSVQERFDVQTGIKMILKLCLADGFDMFPTLLVTDGSCMIDRRMGIHGHPLEIQALFYSALLCAREMLAPEDGSSALIRALNNRVVALSFHIREYYWIDMRKLNEIYRYKTEEYSYDAVNKFNIYPDQIPPWLVEWMPSKGGYLIGNLQPAHMDFRFFSLGNLWSIVSSLATTDQSHAMLDLIEAKWSELVADMPFKICYPAFEGQEWRITTGSDPKNTPWSYHNGGSWPTLLWQLTVACIKMNRPEIAEKAVKIAEKRISRDKWPEYYDTKQGRFIGKQARLFQTWSIAGYLVSKLLLANPDAANILVNREDSDLVSAFSSMLSANPRRKRDWKGLKQKFIV

SEQ ID NO: 409 - DNA, 1812 bp, Sorghum bicolor
  misc_feature: Ceres Annot ID no. 6035762
  misc_feature: Encodes the peptide sequence at SEQ ID NO. 410
atggggatcgcggaggtggctctccacaccatgccgggggcattcaccacccactccccggcatccattctgtccctcagggcagtcgctaggaggaggaacaagaacactgattcggtgcccaacaccagggcactgcaaggcctcctaaggattccgaggctgaggtccgtcaggcggctgtgccagcggatagacgacattgcgagggtcacagaggggaatgggacttgggtcaaggaagccatgaataacgccggccaggttcttggcgacatcagcgtgcctggtcaggctgtaggtggcaatggtagcctaaatgggagtgttgccaagcctccacctcagaggcggaagtcctcatcggttgaggatgaggcctgggaacttctgcaggagtcaatggtttactattgtggtagtcctgttgggacaattgctgccaacgatccaaatgacagtgatccggtgaactatgatcaggtgtttattcgggacttcataccatctggcattgcttttctactgaagggggaatatgaaattgtgcgtaatttcattctacacacccttcagcttcagagctgggagaagacaatggactgccatagtccaggtcaaggtttaatgcccgccagcttcaaagtgcggacaattccgcttgatggtgatgaggatgcaactgaggaggtcttggatcctgattttggggaggccgcaataggccgtgtggcacctgttgattcaggtctatggtggatcatattgcttagggcatatggaaagtgttcaggggatctgtcagtacaggagagaattgatgtccagactggaatgaaaatgattctgaagctttgtttagctgatggtttcgacatgttccctacattactcgtaactgatggttcatgcatgattgatcgtcgaatgggaatccatgggcatccacttgaaattcaggcactcttctattcagccctcttgtgtgcgcgtgagatgttggctcaagaagacggatcagctgacttaatccgcgccctgaacaatagacttattgcactgtcctttcatatcagggagtactactggcttgacatgcaaaagttgaatgagatatatcgatataaaacagaagaatattcttatgatgctgtcaacaaattcaacatataccccgatcagatatctccatggcttgttgagtggatacctcctaaggggggttactttattggaaacctccagccagctcatatggacttccgattcttttcattgggaaatttatggtcaatagtaagcagcttggcaacaactcatcagtcgcatgccattttagaccttatcgagtctaaatggtctgatttagtggcagagatgccactaaagatatgctatcctgctcttgagaaccaggaatggaaaatcatcactgggagtgatcctaaaaacacgccttggtcgtaccacaatggaggatcctggccaacattactgtggcagctcacagtggcatgcatcaagatgaacagaccagagcttgcagccaaagctatagaggtagctgagaggcgtattgctacagacaaatggcctgaatactacgacaccaagagagcacgcttcattgggaaacaggcacggctgtaccaaacgtggtcaattgctgggttcctagtagccaagctactgatagaaaaaccagatgctgctaggattctgtggaacgatgaggatgcagaaatccttaatgctttgagcacaaacagaaaacggggcaagaaagtgttgaagaaaacatacattgtgtga

SEQ ID NO: 410 - protein, 603 aa, Sorghum bicolor
  misc_feature (115)..(587): Pfam name: Invertase_neut Pfam desc: Plant neutral invertase
  misc_feature (157)..(560): Pfam name: GDE_C Pfam desc: Amylo-alpha-1,6-glucosidase
  misc_feature: Ceres Annot ID no. 6035762
  misc_feature: Bit score of 1215.9 for HMM based on sequences of Figure 4
  misc_feature: Functional Homolog Of Ceres Annot ID no. 876994 at SEQ ID NO. 315
MGIAEVALHTMPGAFTTHSPASILSLRAVARRRNKNTDSVPNTRALQGLLRIPRLRSVRRLCQRIDDIARVTEGNGTWVKEAMNNAGQVLGDISVPGQAVGGNGSLNGSVAKPPPQRRKSSSVEDEAWELLQESMVYYCGSPVGTIAANDPNDSDPVNYDQVFIRDFIPSGIAFLLKGEYEIVRNFILHTLQLQSWEKTMDCHSPGQGLMPASFKVRTIPLDGDEDATEEVLDPDFGEAAIGRVAPVDSGLWWIILLRAYGKCSGDLSVQERIDVQTGMKMILKLCLADGFDMFPTLLVTDGSCMIDRRMGIHGHPLEIQALFYSALLCAREMLAQEDGSADLIRALNNRLIALSFHIREYYWLDMQKLNEIYRYKTEEYSYDAVNKFNIYPDQISPWLVEWIPPKGGYFIGNLQPAHMDFRFFSLGNLWSIVSSLATTHQSHAILDLIESKWSDLVAEMPLKICYPALENQEWKIITGSDPKNTPWSYHNGGSWPTLLWQLTVACIKMNRPELAAKAIEVAERRIATDKWPEYYDTKRARFIGKQARLYQTWSIAGFLVAKLLIEKPDAARILWNDEDAEILNALSTNRKRGKKVLKKTYIV

SEQ ID NO: 411 - protein, 606 aa, Oryza sativa subsp. japonica
  misc_feature (118)..(590): Pfam name: Invertase_neut Pfam desc: Plant neutral invertase
  misc_feature (160)..(563): Pfam name: GDE_C Pfam desc: Amylo-alpha-1,6-glucosidase
  misc_feature: Public GI ID no. 115446465
  misc_feature: Bit score of 1208.7 for HMM based on sequences of Figure 4
  misc_feature: Functional Homolog Of Ceres Annot ID no. 876994 at SEQ ID NO. 315
MGIAEVALHSMPGAFAAHSPASNLPLAADAARGRRRRSANSLHSSRALQGPVRFPGLRAAVECQCQRIDDLARVTEGNGAWVKDAVDKASHALGDVRVPGQAVGGNGSVNGSAAKPPPQRRKASSVEDEAWELLRESVVYYCGSPVGTIAANDPNDANPMNYDQVFIRDFIPSGIAFLLKGEYEIVRNFILHTLQLQSWEKTMDCHSPGQGLMPASFKVRTIPLDGDEDATEEVLDPDFGEAAIGRVAPVDSGLWWIILLRAYGKCSGDLTVQERIDVQTGIKMILKLCLADGFDMFPTLLVTDGSCMIDRRMGIHGHPLEIQALFYSALLCAREMLTPEDGSADLIRALNNRLIALSFHIREYYWVDMQKLNEIYRYKTEEYSYDAVNKFNIYPDQVSPWLVEWIPPKGGYFIGNLQPAHMDFRFFSLGNLWSIVSSLATTHQSHAILDLIESKWSDLVAEMPLKICYPALENQEWKIITGSDPKNTPWSYHNGGSWPTLLWQLTVASIKMNRPEIAAKAVEVAERRIAIDKWPEYYDTKRARFIGKQSRLYQTWSIAGYLVAKQLLDKPDAARILSNDEDSEILNALSTNRKRGKKVLKKTFIV

SEQ ID NO: 412 - DNA, 1881 bp, Sorghum bicolor
  misc_feature: Ceres Annot ID no. 6018379
  misc_feature: Encodes the peptide sequence at SEQ ID NO. 413
atggcggccgccgccatctctcacctccgccgcggcgcgcagcgccacgcccacgcggtgctatgcatctcgctgtcgcgccgccgcttctcctcctccgccgtggccgcggcctccccgctcgccgcggccgcgcgccgcctcctctccacgacggcagactccgccgggtccacgtcgggggagcactacaagccgccgcccttcgaccccttccgcgccgccaccctatcgccctcggctctgccgctagagtcgcccccgatcgaggatgagcccccgagcagcccaccgccacaggatgaggcggctgcgtccgaggcggcgcacgagcaggcgacgctggcgtgccaggaggtggaattggagggcctcaaggcgggggtggaggcggtgaagagcagggaggagtccccggaggagaaggaagcgtggtggctgctcagccgcgcggtcgtcaactactgtggcagcgccgtcgggacggtggccgcgaacgatccgtccaccagccagatgctcaattatgaccaggtgttcattagggactttgtgccgtcggctatcgcgttcctcctcaagggtgagagcgatattgtgaagaacttcctgctccacacgttgcagctccagagttgggagaagaccgtggattgctatagtcctggtcaagggttgatgcctgctagtttcaaagttagatccgtgcctttagatggaaatagtgaagcatttgaggaggttcttgacccagattttggagagtcagccattggacgtgtagcacctgttgactctggtctttggtggataatcctgttaagggcatatggaaaaattactggagactatgctctacaagaaagggttgatgtgcagacaggcatcaggctaatactgaatttgtgcttgtctgatggatttgacatgtttcctacattgcttgtaactgatggatcatgtatgattgatcggcggatgggaatccatggtcatcctcttgagatccaggctctgttctattctgctttacgctgtgcccgagaaatgattggtgtaactgatggatccaagaacttgatccgtgctattaacaacaggctcagtgctctgtcatttcacataagagagtattattgggttgatatgaagaagataaatgagatttatcgctataagactgaggagtactcccatgatgctattaacaaattcaacatctacccagagcaaattccgtcttggcttgcagactggattcctgtgaaaggcggttaccttataggcaatctgcagccagctcacatggatttcaggtttttctccttagggaatctgtgggcgattgtctcatctcttgctactcaaaggcaagcagagggtattctgaaccttattgaagccaaatgggatgatatagtagccaacatgcctctcaaaatatgctaccctgcactagagtatgaggaatggcgtatcatcaccggcagtgatcccaaaaacacgccctggtcgtatcataacggtggatcttggcctacattgttatggcagttcaccttagcctgtatcaagatgggtaggcgtgacttggcacggagggcagttgaggtggcagaaaagaggctctcagatgacaagtggccagagtattatgacaccaggacaggaaggttcattggaaaacaatcgcgactgtatcaaacttggaccattgccggatatcttagctctaagatgttattggactgtccagagatggcatccatactagtatgcgacgaagactttgagctgctggaagggtgtgcttgcagcttgaataagaatgctcgcaccaaatgctcacgtcgtgcggccaagtcgcaggttcttgtgtag

SEQ ID NO: 413 - protein, 626 aa, Sorghum bicolor
  misc_feature (132)..(604): Pfam name: Invertase_neut Pfam desc: Plant neutral invertase
  misc_feature: Ceres Annot ID no. 6018379
  misc_feature: Bit score of 1250.6 for HMM based on sequences of Figure 4
  misc_feature: Functional Homolog Of Ceres Annot ID no. 876994 at SEQ ID NO. 315
MAAAAISHLRRGAQRHAHAVLCISLSRRRFSSSAVAAASPLAAAARRLLSTTADSAGSTSGEHYKPPPFDPFRAATLSPSALPLESPPIEDEPPSSPPPQDEAAASEAAHEQATLACQEVELEGLKAGVEAVKSREESPEEKEAWWLLSRAVVNYCGSAVGTVAANDPSTSQMLNYDQVFIRDFVPSAIAFLLKGESDIVKNFLLHTLQLQSWEKTVDCYSPGQGLMPASFKVRSVPLDGNSEAFEEVLDPDFGESAIGRVAPVDSGLWWIILLRAYGKITGDYALQERVDVQTGIRLILNLCLSDGFDMFPTLLVTDGSCMIDRRMGIHGHPLEIQALFYSALRCAREMIGVTDGSKNLIRAINNRLSALSFHIREYYWVDMKKINEIYRYKTEEYSHDAINKFNIYPEQIPSWLADWIPVKGGYLIGNLQPAHMDFRFFSLGNLWAIVSSLATQRQAEGILNLIEAKWDDIVANMPLKICYPALEYEEWRIITGSDPKNTPWSYHNGGSWPTLLWQFTLACIKMGRRDLARRAVEVAEKRLSDDKWPEYYDTRTGRFIGKQSRLYQTWTIAGYLSSKMLLDCPEMASILVCDEDFELLEGCACSLNKNARTKCSRRAAKSQVLV

SEQ ID NO: 414 - protein, 673 aa, Vitis vinifera
  misc_feature (178)..(650): Pfam name: Invertase_neut Pfam desc: Plant neutral invertase
  misc_feature: Public GI ID no. 157353064
  misc_feature: Bit score of 1283.8 for HMM based on sequences of Figure 4
  misc_feature: Functional Homolog Of Ceres Annot ID no. 876994 at SEQ ID NO. 315
MNSSSYIGITTMKPYCRVLTSCRNSSIFKFPSSKSNHFIADNSSKFQSKLIHSRRFHCCSAQILGKKCGINSNRRAFRLSDPNWGQIRVYRSCSGAHGGRRGVLVISNVASDFRKHSTSVESHVNEKGFESIYINGGLNVKPLVIERIERGHVEEESGLEFKDPDVNFDHSEGLNKEKVEREVPEIEKEAWRLLRSAVVDYCGNPVGTVAANDPGDKQPLNYDQVFIRDFVPSALAFLLKGEGEIVKNFLLHTLQLQSWEKTVDCYSPGQGLMPASFKVRTVPLDGGNGAFEEVLDPDFGESAIGRVAPVDSGLWWIILLRAYGKITGDYALQERVDVQTGIRLILNLCLTDGFDMFPSLLVTDGSCMIDRRMGIHGHPLEIQALFYSALRCSREMITVNDGTKNLVRAINNRLSALSFHIREYYWVDMKKINEIYRYKTEEYSTDAINKFNIYPDQIPTWLVDWIPDQGGYLIGNLQPAHMDFRFFTLGNLWSIISSLGTAKQNEGILNLIEAKWDDLVAHMPLKICYPALENEEWRIITGSDPKNTPWSYHNGGSWPTLLWQFTLACIKMGRPELARKAVALAEERLSVDHWPEYYDTRNGRFIGKQSRLYQTWTIAGFLTSKMLLENPEMASLLAWEEDYELLEICVCALSKTGRKKCSRSAARSQIPVQ

SEQ ID NO: 415 - protein, 627 aa, Oryza sativa subsp. indica
  misc_feature (134)..(606): Pfam name: Invertase_neut Pfam desc: Plant neutral invertase
  misc_feature: Public GI ID no. 27948558
  misc_feature: Bit score of 1287.4 for HMM based on sequences of Figure 4
  misc_feature: Functional Homolog Of Ceres Annot ID no. 876994 at SEQ ID NO. 315
MNGQTPMGLAAAAAAAVRPCRRRLLSSATAAAAATVATATPLFPRCPHPHHHLHGRRLPFLASAASQQQQQSGQTAASPATPPIPSDPRAAVSGNLPFFDRVLFPDTFPVETPPPSSAAASAAAAADEEVASALKVREETEAEREAWRLLRRAVVSYCVEPVGTVAAEDPECTETLNYDQVFIRDFVPSALAFLMRGETETVRNFLLHTLQLQSWEKTVDCYSPGQDLMPASFKIRAVPLDDNNEAFEEVLDPDFGESAIGRVAPVDSGLWWIILLRAYCKITGDNALQERVDVQTGIKLILSLCLSDGFDMFPTLLVTDGSCMIDRRMGIHGHPLEIQALFYSALRCSREMLVMNDGSKNLLRAINNRLSALSFHIREHYWVDMKKINEIYRYKTEEYSHDATNKFNIYPEQIPSWLVDWIPEKGGYLIGNLQPAHMDFRFFSLGNLWAITSSLTTPKQAEGILSLIDEKWDDLIANMPLKICYPAMEDDEWRIITGSDPKNTPWSYHNGGSWPTLLWQFTLACIKMGRPELARRAIAVAEEKLAADKWPEYYDTRSGRFIGKQSRSYQTWTIAGFLTSKMLLENPELASILTCNEDLELLEGCACCLSKKRTRCSRRAAKSHVVE

SEQ ID NO: 416 - protein, 673 aa, Vitis vinifera
  misc_feature (178)..(650): Pfam name: Invertase_neut Pfam desc: Plant neutral invertase
  misc_feature: Public GI ID no. 153850908
  misc_feature: Bit score of 1281.4 for HMM based on sequences of Figure 4
  misc_feature: Functional Homolog Of Ceres Annot ID no. 876994 at SEQ ID NO. 315
MNSSSYIGITTMKPYCRVLTSCRNSSIFKFPSSKSNHFIADNSSKFQSKLTQSRRFHCCSAQILGKKCGINSNRRAFRFSDPNWGQIRVYRSCSGAHGGRRGVLVISNVASDFRKHSTSVESHVNEKGFESIYINGGLNVKPLVIERIERGHVEEESGLEFKDPDVNFDHSEGLNKEKVEREVPEIEKEAWRLLRSAVVDYCGNPVGTVAANDPGDKQPLNYDQVFIRDFVPSALAFLLKGEGEIVKNFLLHTLQLQSWEKTVDCYSPGQGLMPASFKVRTVPLDGGNGAFEEVLDPDFGESAIGRVAPVDSGLWWIILLGAYGKITGDYALQERVDVQTGIRLILNLCLTDGFDMFPSLLVTDGSCMIDRRMGIHGHPLEIQALFYSALRCSREMLTVNDGTKNLVRAINNRLSALSFHIREYYWVDMKKINEIYRYKTEEYSTDAINKFNIYPDQIPTWLVDWIPDQGGYLIGNLQPAHMDFRFFTLGNLWSIISSLGTAKQNEGILNLIEAKWDDLVAHMPLKICYPALENEEWRIITGSDPKNTPWSYHNGGSWPALLWQFTLACIKMGRPELARKAVALAEERLSVDHWPEYYDTRSGRFIGKQSRLYQTWTIAGFLTSKMLLENPEMASLLAWEEDYELLEICVCALSKTGRKKCSRSAARSQIPVQ

SEQ ID NO: 417 - protein, 628 aa, Oryza sativa subsp. japonica
  misc_feature (133)..(606): Pfam name: Invertase_neut Pfam desc: Plant neutral invertase
  misc_feature: Public GI ID no. 115452671
  misc_feature: Bit score of 1223.1 for HMM based on sequences of Figure 4
  misc_feature: Functional Homolog Of Ceres Annot ID no. 876994 at SEQ ID NO. 315
MAAAAISHLRRGAPRHARALLYLSTRRFSSSSAAGVAPLAAVAASARRLLSTSVDSGASSTGESYKPPLFDPFRAASLASSAPPLESPPIEELPDDATPPPEEEPGLPAPEKDPVATACQHELEGLKAWVETVRSRKESTEEKEAWSLLGRSVVSYCGTAVGTVAANDPSTANQMLNYDQVFIRDFVPSAIAFLLKGEGDIVKNFLLHTLQLQSWEKTVDCYSPGQGLMPASFKVRSIPLDGNSEAFEEVLDPDFGESAIGRVAPVDSGLWWIILLRAYGKITGDYALQERVDVQTGIRLILNLCLSDGFDMFPTLLVTDGSCMIDRRMGIHGHPLEIQSLFYSALRCAREMVSVNDGSNSLIRAINYRLSALSFHIREYYWVDMKKINEIYRYKTEEYSHDAINKFNIYPEQIPSWLADWIPEKGGYLIGNLQPAHMDFRFFSLGNLWAIISSLATQRQAEGILNLIEAKWEDIIANMPLKICYPALEYEEWRIITGSDPKNTPWSYHNGGSWPTLLWQFTLACIKMGRRDLAQRAIEVAEKRLSEDKWPEYYDTRTGRFIGKQSRLYQTWTIAGYLSSKMLLDCPELASILICEEDLELLEGCACSVNKSARTKCSRRAARSQVLV

SEQ ID NO: 418 - protein, 673 aa, Vitis vinifera
  misc_feature (178)..(650): Pfam name: Invertase_neut Pfam desc: Plant neutral invertase
  misc_feature: Public GI ID no. 147773544
  misc_feature: Bit score of 1283.5 for HMM based on sequences of Figure 4
  misc_feature: Functional Homolog Of Ceres Annot ID no. 876994 at SEQ ID NO. 315
  misc_feature (51)..(51): Xaa is any aa, unknown, or other
  misc_feature (52)..(52): Xaa is any aa, unknown, or other
  misc_feature (79)..(79): Xaa is any aa, unknown, or other
MNSSSYIGITTMKPYCRVLTSCRNSSIFKFPSSKSNHFIADNSSKFQSKLXXSRRFHCCSAQILGKKCGINSNRRAFRXSDPNWGQIRVYRSCSGAHGGRRGVLVISNVASDFRKHSTSVESHVNEKGFESIYINGGLNVKPLVIERIERGHVEEESGLEFKDPDVNFDHSEGLNKEKVEREVPEIEKEAWRLLRSAVVDYCGNPVGTVAANDPGDKQPLNYDQVFIRDFVPSALAFLLKGEGEIVKNFLLHTLQLQSWEKTVDCYSPGQGLMPASFKVRTVPLDGGNGAFEEVLDPDFGESAIGRVAPVDSGLWWIILLRAYGKITGDYALQERVDVQTGIRLILNLCLTDGFDMFPSLLVTDGSCMIDRRMGIHGHPLEIQALFYSALRCSREMXTVNDGTKNLVRAINNRLSALSFHIREYYWVDMKKINEIYRYKTEEYSTDAINKFNIYPDQIPTWLVDWIPDQGGYLIGNLQPAHMDFRFFTLGNLWSIISSLGTAKQNEGILNLIEAKWDDLVAHMPLKICYPALENEEWRIITGSDPKNTPWSYHNGGSWPTLLWQFTLACIKMGRPELARKAVALAEERLSVDHWPEYYDTRNGRFIGKQSRLYQTWTIAGFLTSKMLLENPEMASLLAWEEDYELLEICVCALSKTGRKKCSRSAARSQIPVQ

SEQ ID NO: 419 - protein, 541 aa, Vitis vinifera
  misc_feature (47)..(519): Pfam name: Invertase_neut Pfam desc: Plant neutral invertase
  misc_feature: Public GI ID no. 157347020
  misc_feature: Bit score of 1221.7 for HMM based on sequences of Figure 4
  misc_feature: Functional Homolog Of Ceres Annot ID no. 876994 at SEQ ID NO. 315
MNVKPLVVERIDIDETIENNEESRIEVDGNFLNGENVKGVDESEVLITKREESEAEKEAWKLLQDSVVMYCGSPIGTMAANDPGDKTPLNYDQVFIRDFVPSALAFLLKGEGEIVRNFLLHTLQLQSWEKTVDCYSPGQGLMPASFKVRTVPLDGNNEAHEEVLDPDFGESAIGRVAPVDSGLWWIILLRAYGKITGDYTLQERVDVQTGIKLILNLCLTDGFDMFPSLLVTDGSCMIDRRMGIHGHPLEIQALFYSALRCSREMLTQNDASINLVRAINNRLSALSFHIREYYWVDMKKINEIYRYKTEEYSTDATNKFNIYPDQIPSWLMDWVPEEGGYLIGNLQPAHMDFRFFTLGNLWSIISSLGTPKQNQGILDTIQAKWDDLVGHMPLKICYPALEYEEWRIITGSDPKNTPWSYHNGGSWPTLLWQFTLACIKMGRPELARKAVADAEKRLAVDRWPEYYDTRNGRFIGKQSRLFQTWTIAGYLTSKMLLENPEMAALLFWEEDYDLLEICVCGLSKTGRRKCSRFAARSQILV

SEQ ID NO: 420 - protein, 574 aa, Oryza sativa subsp. japonica
  misc_feature (79)..(551): Pfam name: Invertase_neut Pfam desc: Plant neutral invertase
  misc_feature (133)..(524): Pfam name: GDE_C Pfam desc: Amylo-alpha-1,6-glucosidase
  misc_feature: Public GI ID no. 115458252
  misc_feature: Bit score of 1192.1 for HMM based on sequences of Figure 4
  misc_feature: Functional Homolog Of Ceres Annot ID no. 876994 at SEQ ID NO. 315
MEIARVVAPPLRLAWCPASRRWGRRKGRPPCPSSLPGPRHDHAVKRPGGEAAGGRSVNGAAPAPAPAPAEAPAKAPQRRQRRGPHDVEDEAWGLLRESVVRYCGSPVGTIAACDPNDASPLNYDQVFIRDFVPSGIAFLLKGDYEIVRNFILHTLQLQSWEKTMDCHSPGQGLMPASFKVRVVPLDGDDDVTEEVLDPDFGEAAIGRVAPVDSGLWWIILLRAYGKCSGDLSVQERIDVQTGIKMILKLCLADGFDMFPTLLVTDGSCMIDRRMGIHGHPLEIQALFYSALLCAREMLTPEDGSADLIRALNSRLIALSFHIREYYWLDKRKLNEIYRYKTEEYSYDAVNKFNIYPDQIPPWLVEWIPPKGGYFIGNLQPAHMDFRFFSLGNLWSIVSSLATSHQSDAILDLVEAKWSDLVADMPMKICYPALEDQEWKFITGSDPKNTAWSYHNGGSWPTLLWQLTVACIKVDRSEIAAKAVEVAERRIANDKWPEYYDTKRARFIGKQSRLFQTWTIAGFLVAKQLLENPDKSRILWNNEDEEILNAMNRMTDASNLKRRRGRKGLKKTYIV

SEQ ID NO: 421 - protein, 574 aa, Oryza sativa subsp. indica
  misc_feature (79)..(551): Pfam name: Invertase_neut Pfam desc: Plant neutral invertase
  misc_feature: Public GI ID no. 125548194
  misc_feature: Bit score of 1194.5 for HMM based on sequences of Figure 4
  misc_feature: Functional Homolog Of Ceres Annot ID no. 876994 at SEQ ID NO. 315
MEIARVVAPPLRLAWCPASRRWGRRKGRPPCPSSLPGPRHDHAVKRPGGEAAGGRSVNGAAPAPAPAPAEAPAKAPQRRQRRGPHDVEDEAWGLLRESVVRYCGSPVGTIAACDPNDASPLNYDQVFIRDFVPSGIAFLLKGDYEIVRNFILHTLQLQSWEKTMDCHSPGQGLMPASFKVRVVPLDGDDDVTEEVLDPDFGEAAIGRVAPVDSGLWWIILLRAYGKCSGDLSVQERIDVQTGIKMILKLCLADGFDMFPTLLVTDGSCMIDRRMGIHGHPLEIQALFYSALLCAREMLTPEDGSADLIRALNSRLIALSFHIREYYWLDKRKLNEIYRYKTEEYSYDAVNKFNIYPDQIPPWLVEWIPPKGGYFIGNLQPAHMDFRFFSLGNLWSIVSSLATSHQSDAILDLVEAKWSDLVADMPMKICYPALEDQEWKFITGSDPKNTPWSYHNGGSWPTLLWQLTVACIKVDRSEIAAKAVEVAERRIANDKWPEYYDTKRARFIGKQSRLFQTWTIAGFLVAKQLLENPDKSRILWNNEDEEILNAMNRMTDASNLKRRRGRKGLKKTYIV

SEQ ID NO: 422 - protein, 571 aa, Lolium temulentum
  misc_feature (83)..(555): Pfam name: Invertase_neut Pfam desc: Plant neutral invertase
  misc_feature: Public GI ID no. 2832717
  misc_feature: Bit score of 1186.4 for HMM based on sequences of Figure 4
  misc_feature: Functional Homolog Of Ceres Annot ID no. 876994 at SEQ ID NO. 315
MRKRGTNSFYRTLGGPPKFPELRPVECQCQRIDDLAGVIKAGNGTWANDMVNKASQVLGDVAVPGQALGGNASLSGNPEKVLPRRRNLSSVEDEAWDLLRESVVNYCGSPVGTIAANDPNDSNPANYDQVFIRDFIPSGIAFLLKGEYEIVRNFILHTLQLQSWEKTMDCHSPGQGLMPASFKVRTIPLDGDENATEEVLDPDFGEAAIGRVAPVDSGLWWIILLRAYGKCSGDLSVQERIDVQTGIKMILKLCLADGFDMFPTLLVTDGSCMIDRRMGIHGHPLEIQALFYSALLSAREMLTPEDGSADLIRALNNRLVALSFHIREYYWVDMQKLNEIYRYKTEEYSYDAVNKFNIYPDQVSPWLVEWIPPKGGYFIGNLQPAHMDFRFFSLGNLWSIVSSLATTQQSHAILDLIESKWSDLVAEMPLKICYPALENLEWKIITGSDPKNTPWSYHNGGSWPTLLWQLTVASLKMNRPEIAAKAVEIAERRIATDKWPEYYDTKRARFIGKQSRLYQTWSIAGYLVAKQLLDKPDAARILWNDEDTEILNAFSTNRKRGKKVLKKTYIV

SEQ ID NO: 423 - protein, 603 aa, Lolium perenne
  misc_feature (115)..(587): Pfam name: Invertase_neut Pfam desc: Plant neutral invertase
  misc_feature: Public GI ID no. 124270304
  misc_feature: Bit score of 1190.6 for HMM based on sequences of Figure 4
  misc_feature: Functional Homolog Of Ceres Annot ID no. 876994 at SEQ ID NO. 315
MGIAEVALHTMPGAFASHSPASSLPLRTDTRSMRKRGTNSFYRTLGGPPKFPELRPVECQCQRIDDLAGVIEAGNGTWANDMVNKASQVLGDVAVPGQAIGGNASLSGNPEKVLPRRRNLSSVEDEAWDLLRESVVNYCGSPVGTIAANDPNDSNPANYDQVFIRDFIPSGIAFLLKGEYEIVRNFILHTLQLQSWEKTMDCHSPGQGLMPASFKVRTIPLDGDENATEEVLDPDFGEAAIGRVAPVDSGLWWIILLRAYGKCSGDLSVQERIDVQTGIKMILKLCLADGFDMFPTLLVTDGSCMIDRRMGIHGHPLEIQALFYSALLSAREMLTPEDGSADLIRALNNRLVALSFHIREYYWVDMQKLNEIYRYKTEEYSYDAVNKFNIYPDQVSPWLVEWIPPKGGYFIGNLQPAHMDFRFFSLGNLWSIVSSLATTQQSHAILDLIESKWSDLVAEMPLKICYPALENLEWKIITGSDPKNTPWSYHNGGSWPTLLWQLTVASLKMNRPEIAAKAVEIAERRIATDKWPEYYDTKRARFIGKQSRLYQTWSIAGYLVAKQLLDKPDAARILWNDEDTEILNAFSTNRKRGKKVLKKTYIV

SEQ ID NO: 424 - protein, 624 aa, Oryza sativa subsp. indica
  misc_feature (118)..(608): Pfam name: Invertase_neut Pfam desc: Plant neutral invertase
  misc_feature: Public GI ID no. 125539719
  misc_feature: Bit score of 1177.1 for HMM based on sequences of Figure 4
  misc_feature: Functional Homolog Of Ceres Annot ID no. 876994 at SEQ ID NO. 315
MGIAEVALHSMPGAFAAHSPASNLPLAADAARGRRRRSANSLHSSRALQGPVRFPGLRAAVECQCQRIDDLARVTEGNGAWVKDAVDKASHALGDVRVPGQAVGGNGSVNGSAAKPPPQRRKASSVEDEAWELLRESVVYYCGSPVGTIAANDPNDANPMNYDQVFIRDFIPSGIAFLLKGEYEIVRNFILHTLQLQVFFFRHIIALSLEEVRTMSWEKTMDCHSPGQGLMPASFKVRTIPLDGDEDATEEVLDPDFGEAAIGRVAPVDSGLWWIILLRAYGKCSGDLTVQERIDVQTGIKMILKLCLADGFDMFPTLLVTDGSCMIDRRMGIHGHPLEIQALFYSALLCAREMLTPEDGSADLIRALNNRLIALSFHIREYYWVDMQKLNEIYRYKTEEYSYDAVNKFNIYPDQVSPWLVEWIPPKGGYFIGNLQPAHMDFRFFSLGNLWSIVSSLATTHQSHAILDLIESKWSDLVAEMPLKICYPALENQEWKIITGSDPKNTPWSYHNGGSWPTLLWQLTVASIKMNRPEIAAKAVEVAERRIAIDKWPEYYDTKRARFIGKQSRLYQTWSIAGYLVAKQLLDKPDAARILSNDEDAEILNALSTNRKRGKKVLKKTFIV

SEQ ID NO: 425 - DNA, 2034 bp, Populus balsamifera subsp. trichocarpa
  misc_feature: Ceres Annot ID no. 1469136
  misc_feature: Encodes the peptide sequence at SEQ ID NO. 426
atggctagccctggtgccctcaacatagggataagaccattgacgtggcttcccctagtttgtttggcacaaccccaacaacaagtcaatttgaccttttccaccattgttgaaggaaggagccatgtctttctccgtggccaccctcaaaaaccatgtgcttttctgtatacttggtcatggttcagctgtcctttttccatggataaactcaaatgtcttttgatttccattctttgctgcacttttttctttcatcggtctggccaatctaggcttatagcacgagatagtagggcggtttctgttgttgctagtgttgcctcacaattcagggagttttcaacgtctgttgagacaagagtgaatgataagaattttgagagaatttttgtgcaaaatgggattagtgttaagcctttggtggttgagaggattgataaagatgagcatgttttaggggatgaagaatctaggctaggggttcttgttgatgatggtgaaagtgtaaatagagaggatttggatggtggtcaaggagttgagattgttagtactaagagggaagagagtgatatagaaaaggaagcatggaagttgttgaatgatgctgttgttatgtactgtgggagtcctgtggggaccgtggccgcaaatgatccaggggataagatgccattgaattatgatcaggtgtttgttcgtgattttgttccttcagctctcgcctttttgcttagaggagaaggggagattgtgaagaatttcttgcttcatgccttgcaattgcagagttgggagaaaacagtggactgctatagtccaggacaggggctgatgcctgccagttttaaagtcagaacagtgcctcttgatgacaataatcttgaagaagttttagatcctgattttggcgaatcagctattggccgtgttgcacctgtggattctgggttgtggtggattattttattgagggcatatgggaaactcactggtgactatgctttacaagaaagggtggatgttcagactggcataaaactgatcttaaacttatgcttagctgatgggtttgatatgtttccttctcttctagtcaccgatggctcctgcatgatagatcggcggatggggatccatggtcacccccttgagatccaagccttgttttattctgctctacggtcttcccgtgagatgctagttgtaaatgatggatcaaagaatttggtgagggctatcaacaacagactcagtgcattgtcattccacattagagaatactattgggtagatatgagaaagatcaatgagatataccggtataaaacagaagagtattctacagaagccaccaacaaatttaatatttatcctgaacaaattccatcatggctcatggattggatacctgaggaaggtggatatctgattggcaatctgcagccagctcacatggattttagatttttcactcttggaaatctttggtctgttgtttcatctttgggtaccccaaaacaaaatgaagctgttctaaatctgattgaatccaaatgggatgatcttgtgggaaatatgcctcttaagatatgttaccctgctctggagtctgaggattggcgtataatcaccggcagtgaccctaagaacaccccttggtcatatcataatggtgggtcatggccaacacttctgtggcagttcacattggcatgcatgaagatggatagaatggaactagctcagaaggctattgctttggccgagaagagacttcaagttgaccattggccagagtattatgacacccgaagtgggaagtttattggaaagcaatcccgactttatcaaacatggacggttgcaggtttcctaacatcgaaagttctcttggagaatccagagaaggcatccttgttattctgggatgaggattatgatcttcttgagttctgtgtttgtgggcttaacacaagtggccggaagaggtgttctcgagtcgccgccaggtcacagattcttgtctag

SEQ ID NO: 426 - protein, 610 aa, Populus balsamifera subsp. trichocarpa
  misc_feature (118)..(588): Pfam name: Invertase_neut Pfam desc: Plant neutral invertase
  misc_feature (172)..(561): Pfam name: GDE_C Pfam desc: Amylo-alpha-1,6-glucosidase
  misc_feature: Ceres Annot ID no. 1469136
  misc_feature: Bit score of 1217.7 for HMM based on sequences of Figure 4
  misc_feature: Functional Homolog Of Ceres Annot ID no. 876994 at SEQ ID NO. 315
MDKLKCLLISILCCTFFFHRSGQSRLIARDSRAVSVVASVASQFREFSTSVETRVNDKNFERIFVQNGISVKPLVVERIDKDEHVLGDEESRLGVLVDDGESVNREDLDGGQGVEIVSTKREESDIEKEAWKLLNDAVVMYCGSPVGTVAANDPGDKMPLNYDQVFVRDFVPSALAFLLRGEGEIVKNFLLHALQLQSWEKTVDCYSPGQGLMPASFKVRTVPLDDNNLEEVLDPDFGESAIGRVAPVDSGLWWIILLRAYGKLTGDYALQERVDVQTGIKLILNLCLADGFDMFPSLLVTDGSCMIDRRMGIHGHPLEIQALFYSALRSSREMLVVNDGSKNLVRAINNRLSALSFHIREYYWVDMRKINEIYRYKTEEYSTEATNKFNIYPEQIPSWLMDWIPEEGGYLIGNLQPAHMDFRFFTLGNLWSVVSSLGTPKQNEAVLNLIESKWDDLVGNMPLKICYPALESEDWRIITGSDPKNTPWSYHNGGSWPTLLWQFTLACMKMDRMELAQKAIALAEKRLQVDHWPEYYDTRSGKFIGKQSRLYQTWTVAGFLTSKVLLENPEKASLLFWDEDYDLLEFCVCGLNTSGRKRCSRVAARSQILV

SEQ ID NO: 427 - DNA, 2007 bp, Populus balsamifera subsp. trichocarpa
  misc_feature: Ceres Annot ID no. 1522532
  misc_feature: Encodes the peptide sequence at SEQ ID NO. 428
atgaatactattagtattattggcaattctacaatgaaaccctcttgtagatttcttatatctacgaaaaatccagtcttttttaagcgccatcatagtttaacaagcaatttatctgggaatcagtttaattttgataaaaccaagcagtttttgacctgctcttttagaatcttggggttcaaaaccattttcaatgaatcccggaaatctttttgtgttcccaatatcaggtctggccaatctaggcttatagcacgagatagtagggcggtttctgttgttgctagtgttgcctcacaattcagggagttttcaacgtctgttgagacaagagtgaatgataagaattttgagagaatttttgtgcaaaatgggattagtgttaagcctttggtggttgagaggattgataaagatgagcatgttttaggggatgaagaatctaggctaggggttcttgttgatgatggtgaaagtgtaaatagagaggatttggatggtggtcaaggagttgagattgttagtactaagagggaagagagtgatatagaaaaggaagcatggaagttgttgaatgatgctgttgttatgtactgtgggagtcctgtggggaccgtggccgcaaatgatccaggggataagatgccattgaattatgatcaggtgtttgttcgtgattttgttccttcagctctcgcctttttgcttagaggagaaggggagattgtgaagaatttcttgcttcatgccttgcaattgcagagttgggagaaaacagtggactgctatagtccaggacaggggctgatgcctgccagttttaaagtcagaacagtgcctcttgatgacaataatcttgaagaagttttagatcctgattttggcgaatcagctattggccgtgttgcacctgtggattctgggttgtggtggattattttattgagggcatatgggaaactcactggtgactatgctttacaagaaagggtggatgttcagactggcataaaactgatcttaaacttatgcttagctgatgggtttgatatgtttccttctcttctagtcaccgatggctcctgcatgatagatcggcggatggggatccatggtcacccccttgagatccaagccttgttttattctgctctacggtcttcccgtgagatgctagttgtaaatgatggatcaaagaatttggtgagggctatcaacaacagactcagtgcattgtcattccacattagagaatactattgggtagatatgagaaagatcaatgagatataccggtataaaacagaagagtattctacagaagccaccaacaaatttaatatttatcctgaacaaattccatcatggctcatggattggatacctgaggaaggtggatatctgattggcaatctgcagccagctcacatggattttagatttttcactcttggaaatctttggtctgttgtttcatctttgggtaccccaaaacaaaatgaagctgttctaaatctgattgaatccaaatgggatgatcttgtgggaaatatgcctcttaagatatgttaccctgctctggagtctgaggattggcgtataatcaccggcagtgaccctaagaacaccccttggtcatatcataatggtgggtcatggccaacacttctgtggcagttcacattggcatgcatgaagatggatagaatggaactagctcagaaggctattgctttggccgagaagagacttcaagttgaccattggccagagtattatgacacccgaagtgggaagtttattggaaagcaatcccgactttatcaaacatggacggttgcaggtttcctaacatcgaaagttctcttggagaatccagagaaggcatccttgttattctgggatgaggattatgatcttcttgagttctgtgtttgtgggcttaacacaagtggccggaagaggtgttctcgagtcgccgccaggtcacagattcttgtctag

SEQ ID NO: 428 - protein, 668 aa, Populus balsamifera subsp. trichocarpa
  misc_feature (176)..(646): Pfam name: Invertase_neut Pfam desc: Plant neutral invertase
  misc_feature (230)..(619): Pfam name: GDE_C Pfam desc: Amylo-alpha-1,6-glucosidase
  misc_feature: Ceres Annot ID no. 1522532
  misc_feature: Bit score of 1232.6 for HMM based on sequences of Figure 4
  misc_feature: Functional Homolog Of Ceres Annot ID no. 876994 at SEQ ID NO. 315
MNTISIIGNSTMKPSCRFLISTKNPVFFKRHHSLTSNLSGNQFNFDKTKQFLTCSFRILGFKTIFNESRKSFCVPNIRSGQSRLIARDSRAVSVVASVASQFREFSTSVETRVNDKNFERIFVQNGISVKPLVVERIDKDEHVLGDEESRLGVLVDDGESVNREDLDGGQGVEIVSTKREESDIEKEAWKLLNDAVVMYCGSPVGTVAANDPGDKMPLNYDQVFVRDFVPSALAFLLRGEGEIVKNFLLHALQLQSWEKTVDCYSPGQGLMPASFKVRTVPLDDNNLEEVLDPDFGESAIGRVAPVDSGLWWIILLRAYGKLTGDYALQERVDVQTGIKLILNLCLADGFDMFPSLLVTDGSCMIDRRMGIHGHPLEIQALFYSALRSSREMLVVNDGSKNLVRAINNRLSALSFHIREYYWVDMRKINEIYRYKTEEYSTEATNKFNIYPEQIPSWLMDWIPEEGGYLIGNLQPAHMDFRFFTLGNLWSVVSSLGTPKQNEAVLNLIESKWDDLVGNMPLKICYPALESEDWRIITGSDPKNTPWSYHNGGSWPTLLWQFTLACMKMDRMELAQKAIALAEKRLQVDHWPEYYDTRSGKFIGKQSRLYQTWTVAGFLTSKVLLENPEKASLLFWDEDYDLLEFCVCGLNTSGRKRCSRVAARSQILV

SEQ ID NO: 429 - protein, 536 aa, Arabidopsis thaliana
  misc_feature (43)..(515): Pfam name: Invertase_neut Pfam desc: Plant neutral invertase
  misc_feature: Public GI ID no. 12322685
  misc_feature: Bit score of 1167.2 for HMM based on sequences of Figure 4
  misc_feature: Functional Homolog Of Ceres Annot ID no. 876994 at SEQ ID NO. 315
MFVKPLVFKEVEKTEGIPKRERGNVGGGKDANFGNVGVRKETERCLSQTEVEKEAWKLLRGAVVNYCGFPVGTVAANDPGDTQTLNYDQVFIRDFVPSAYAFMLDGEGEIVRNFLLHTLQLQSWEKTVDCHSPGPGLMPASFKVKSAPLEGNDGSFEEFLDPDFGGSAIGRVSPVDSGLWWIILLRAYGKLTGDYTLQERIDVQTGIKLILKLCLADGFDMFPTLLVTDGSCMVDRRMGIHGHPLEIQALFYSALRCAREMLIVNDGTKSLVTAVNNRLSALSFHIREYYWVDIKKINEIYRYNTEEYSADATNKFNIYPEQIPTWLVDWIPDKGGYFIGNLQPAHMDFRFFTLGNLWAVISSLGNQEQNEGVMTLIEEKWDDLVANMPLKICFPALEKDEWRIITGSDPKNTPWSYHNGGSWPTLLWQFTLACIKMGKLELAKKAVAVAEKRLKEDEWPEYYDTKSGRFVGKQSRLYQTWTIAGFLAAKKLIEQPEKASLLFWEEDYQLLETCVCGLSKSSGRKNKCSRFTPPRS

SEQ ID NO: 430 - protein, 664 aa, Arabidopsis thaliana
  misc_feature (171)..(643): Pfam name: Invertase_neut Pfam desc: Plant neutral invertase
  misc_feature (249)..(616): Pfam name: GDE_C Pfam desc: Amylo-alpha-1,6-glucosidase
  misc_feature: Public GI ID no. 30794036
  misc_feature: Bit score of 1193.2 for HMM based on sequences of Figure 4
  misc_feature: Functional Homolog Of Ceres Annot ID no. 876994 at SEQ ID NO. 315
MNSRSCICVSAMKPCCRFLISFRSSSLFGFSPPNSGKFINSSKLHCTKIDSRSIRSGIHCRRIVLDRNAFCDSDSISWGGGGSRVLRARGSSRGRGRGVLVIPHVASDFRNYSTSSLDSHVNDKSFESMFVKPLVFKEVEKTEGIPKRERGNVGGGKDANFGNVGVRKETERCLSQTEVEKEAWKLLRGAVVNYCGFPVGTVAANDPGDTQTLNYDQVFIRDFVPSAYAFMLDGEGEIVRNFLLHTLQLQSWEKTVDCHSPGPGLMPASFKVKSAPLEGNDGSFEEFLDPDFGGSAIGRVSPVDSGLWWIILLRAYGKLTGDYTLQERIDVQTGIKLILKLCLADGFDMFPTLLVTDGSCMVDRRMGIHGHPLEIQALFYSALRCAREMLIVNDGTKSLVTAVNNRLSALSFHIREYYWVDIKKINEIYRYNTEEYSADATNKFNIYPEQIPTWLVDWIPDKGGYFIGNLQPAHMDFRFFTLGNLWAVISSLGNQEQNEGVMTLIEEKWDDLVANMPLKICFPALEKDEWRIITGSDPKNTPWSYHNGGSWPTLLWQFTLACIKMGKLELAKKAFAVAEKRLKEDEWPEYYDTKSGRFVGKQSRLYQTWTIAGFLAAKKLIEQPEKASLLFWEEDYQLLETCVCGLSKSSGRKNKCSRFTPPRS

SEQ ID NO: 431 - protein, 668 aa, Ipomoea trifida
  misc_feature (133)..(645): Pfam name: Invertase_neut Pfam desc: Plant neutral invertase
  misc_feature: Public GI ID no. 118562909
  misc_feature: Bit score of 1167.4 for HMM based on sequences of Figure 4
  misc_feature: Functional Homolog Of Ceres Annot ID no. 876994 at SEQ ID NO. 315
MGVPALQVLPGELSCRFFRRCSSTVASNSLLLLKDHLKVKGKNSRVKCFKDLGTITSSSKLCAVRDFYGLEKPNLLRCYCQPAERGNERIFEDEQGRSVHSIAPNGQTSDAAQQFKNDNGTVPSSKTVNNALPKSSTNSIEEEAWNLLRASMVYYCGNPIGTIAANDPSDSSILNYDQVFIRDFIPSGIAFLLKGEYDIVRNFLLHTLQLQPVLLCINTLPSKQSWEKTMDCYSPGQGLMPASFKVRTVPLDNDENATEDVLDPDFGEAAIGRVAPVDSGLWWIILLRAYGKCSGDLSLLERIDVQTGMKMILKLCLADGFDMFPTLLVTDGSCMIDRRMGIHGHPLEIQALFYSALLCAREMLAPEEASIDLITALNNRLLALSFHIREYYWIDVKKLNEIYRYKTEEYSYEAINKFNIYPDQIPPWLVEWMPSKGGYLIGNLQPAHMDFRFFSLGNLWSIVSSLATTDQSHAILDLIETKWEDLVANMPLKICYPALEGQEWRIITGGDPKNTPWSYHNAGSWPTLLWQGSPFSMLIVKVSLVEQKIEDSASKFDAILAVACVKMKRPEIAENAIKVAERRIAGDKWPEYYDTKRGGFIGKQARLFQTWSIAGYLVAKLLVANPEAAKMLITIEDTELLSAFSSILSSNPRRKRSRKGAVKQSYIV

SEQ ID NO: 432 - protein, 633 aa, Arabidopsis thaliana
  misc_feature (139)..(611): Pfam name: Invertase_neut Pfam desc: Plant neutral invertase
  misc_feature (193)..(584): Pfam name: GDE_C Pfam desc: Amylo-alpha-1,6-glucosidase
  misc_feature: Public GI ID no. 30679615
  misc_feature: Bit score of 1186.7 for HMM based on sequences of Figure 4
  misc_feature: Functional Homolog Of Ceres Annot ID no. 876994 at SEQ ID NO. 315
MNAITFLGNSTMIPSQCILRAFTRISPSKYIRDTSFRSYPSRFSSCINQYRNADSDRIIRPTNAVPFCTDRQSSVTAQVVSEARSHSASTTCANDTTLDQIYTKNGLNVKPLVVERLKRDEKDEEAVNEDEEGVKRDGFEGVKCNDVEEEAWRLLRDSIVTYCDSPVGTVAAKDPTDTTPSNYDQVFIRDFVPSALAFLLKGESEIVRNFLLHTLQLQSWEKTVDCYSPGQGLMPASFKVRTLPLEEDKFEEVLDPDFGEAAIGRVAPVDSGLWWIILLRAYGKITGDYSLQERIDVQTGIKMIANLCLADGFDMFPTLLVTDGSCMIDRRMGIHGHPLEIQALFYSALRSSREMITVNDSSKNIIKTISNRLSALSFHIRENYWVDKNKINEIYRYKTEEYSMDATNKFNIYPEQVSPWLMDWVPESPDSGFLIGNLQPAHMDFRFFTLGNLWSIISSLGTPKQNQAILNLVEEKWDDLVGHMPLKICYPALESSEWHIITGSDPKNTPWSYHNGGSWPTLLWQFTLACIKMGRPELAEKAVTLAEKRLQADRWPEYYDTRDGKFIGKQSRLYQTWTIAGFLTSKQLLQNPEIASSLFWEEDLELLESCVCVLTKSGRKKCSRAAAKSQILI

SEQ ID NO: 433 - protein, 861 aa, Oryza sativa subsp. japonica
  misc_feature (356)..(838): Pfam name: Invertase_neut Pfam desc: Plant neutral invertase
  misc_feature (1)..(241): Pfam name: Hist_deacetyl Pfam desc: Histone deacetylase domain
  misc_feature: Public GI ID no. 125590306
  misc_feature: Bit score of 1142.0 for HMM based on sequences of Figure 4
  misc_feature: Functional Homolog Of Ceres Annot ID no. 876994 at SEQ ID NO. 315
MLEKDRIAYFYDDNLGEDCPVFDNLFEFCQIYAGGTLDAARRLNHKTCDIAINWAGGLHHAKKCEASGFCYINDLVLGILELLKYHARVLYIDIDVHHGDGVEEAFYFTDRVMTVSFHKYGDFFFPGTGDIKDIGEREGKYYAINIPLKDGIDDSGFTRLFKTVIAKVVETYLPGAIVLQCGADSLARDRLGCFNLSIEGHAECVKFVKKFNIPLLVTGGGGYTKENVARCWAVETGVLLDTELPNEIPDNEYIKYFAPDYTLKVSNVNMDNLNSKSYLSSIKVQVMESLRAIQHAPGVQMQEVPPDFYIPDIDEDELDPDERVDQHTQDKQIHRDDEYYEAPAPAEAPAKAPQRRQRRGPHDVEDEAWGLLRESVVRYCGSPVGTIAACDPNDASPLNYDQVFIRDFVPSGIAFLLKGDYEIVRNFILHTLQLQSWEKTMDCHSPGQGLMPASFKVRVVPLDGDDDVTEEVLDPDFGEAAIGRVAPVDSGLWWIILLRAYGKCSGDLSVQERIDVQTGIKMILKLCLADGFDMFPTLLVTDGSCMIDRRMESMTPIGNSVLLYNSTYRTTALFYSALLCAREMLTPEDGSADLIRALNSRLIALSFHIREYYWLDKRKLNEIYRYKTEEYSYDAVNKFNIYPDQIPPWLVEWIPPKGGYFIGNLQPAHMDFRFFSLGNLWSIVSSLATSHQSDAILDLVEAKWSDLVADMPMKICYPALEDQEWKFITGSDPKNTAWSYHNGGSWPTLLWQLTVACIKVDRSEIAAKAVEVAERRIANDKWPEYYDTKRARFIGKQSRLFQTWTIAGFLVAKQLLENPDKSRILWNNEDEEILNAMNRMTDASNLKRRRGRKGLKKTYIV

SEQ ID NO: 434 - protein, 634 aa, Oryza sativa subsp. indica
  misc_feature (133)..(557): Pfam name: Invertase_neut Pfam desc: Plant neutral invertase
  misc_feature: Public GI ID no. 125543620
  misc_feature: Bit score of 999.8 for HMM based on sequences of Figure 4
  misc_feature: Functional Homolog Of Ceres Annot ID no. 876994 at SEQ ID NO. 315
MAAAAISHLRRGAPRHARALLYLSTRRFSSSSAAGVAPLAAVAASARRLLSTSVDSGASSTGESYKPPLFDPFRAASLASSAPPLESPPIEELPDDATPPPEEEPGLPAPEKDPVATACQHELEGLKAWVETVRSRKESTEEKEAWSLLGRSVVSYCGTAVGTVAANDPSTANQMLNYDQVFIRDFVPSAIAFLLKGEGDIVKNFLLHTLQLQSWEKTVDCYSPGQGLMPASFKVRSIPLDGNSEAFEEVLDPDFGESAIGRVAPVDSVTDGSCMIDRRMGIHGHPLEIQSLFYSALRCAREMVSVNDGSNSLIRAINYRLSALSFHIREYYWVDMKKINEIYRYKTEEYSHDAINKFNIYPEQIPSWLADWIPEKGGYLIGNLQPAHMDFRFFSLGNLWAIISSLATQRQAEGILNLIEAKWEDIIANMPLKICYPALEYEEWRIITGSDPKNTPWSYHNGGSWPTLLWQFTLACIKMGRRDLAQRAIEVAEKRLSEDKWPEYYDTRTGRFIGKQSRLYQTWTIAGYLSSKMLLDCPELASILICEEDLELLEGCACSVNKSARTKCSRRAARSQEPGGSWNCEVSLAETNKIQARSLALQLDQLNTVVGEQKSIQQNLEDVKKKKLKYANIC

SEQ ID NO: 435 - protein, 704 aa, Oryza sativa subsp. japonica
  misc_feature (133)..(557): Pfam name: Invertase_neut Pfam desc: Plant neutral invertase
  misc_feature: Public GI ID no. 125586048
  misc_feature: Bit score of 1001.6 for HMM based on sequences of Figure 4
  misc_feature: Functional Homolog Of Ceres Annot ID no. 876994 at SEQ ID NO. 315
MAAAAISHLRRGAPRHARALLYLSTRRFSSSSAAGVAPLAAVAASARRLLSTSVDSGASSTGESYKPPLFDPFRAASLASSAPPLESPPIEELPDDATPPPEEEPGLPAPEKDPVATACQHELEGLKAWVETVRSRKESTEEKEAWSLLGRSVVSYCGTAVGTVAANDPSTANQMLNYDQVFIRDFVPSAIAFLLKGEGDIVKNFLLHTLQLQSWEKTVDCYSPGQGLMPASFKVRSIPLDGNSEAFEEVLDPDFGESAIGRVAPVDSVTDGSCMIDRRMGIHGHPLEIQSLFYSALRCAREMVSVNDGSNSLIRAINYRLSALSFHIREYYWVDMKKINEIYRYKTEEYSHDAINKFNIYPEQIPSWLADWIPEKGGYLIGNLQPAHMDFRFFSLGNLWAIISSLATQRQAEGILNLIEAKWEDIIANMPLKICYPALEYEEWRIITGSDPKNTPWSYHNGGSWPTLLWQFTLACIKMGRRDLAQRAIEVAEKRLSEDKWPEYYDTRTGRFIGKQSRLYQTWTIAGYLSSKMLLDCPELASILICEEDLELLEGCACSVNKSARTKCSRRAARSQLTESPEVMRARHAVQLLHPALFRSKQSWVKLSVVKTRLQSRSEIAPFFFTDAPSLTSLIAPCILCHLKEQEPGGSWNCEVSLAETNKIQARSLALQLDQLNTVVGEQKSIQQNLEDVKKKKLKYANIC

SEQ ID NO: 436 - protein, 536 aa, Arabidopsis thaliana
  misc_feature (62)..(529): Pfam name: Invertase_neut Pfam desc: Plant neutral invertase
  misc_feature: Bit score of 1494.8 for HMM based on sequences of Figure 4
  misc_feature: Functional Homolog Of Ceres Annot ID no. 876994 at SEQ ID NO. 315
MDDFDLTRALEKPRQLKIERKRSFDERSMSELSTGYVRQDSILEMAHSPGSRSMVDTPLSVRNSFEPHPMVAEAWEALRRSMVFFRGQPVGTIAAYDHASEEVLNYDQVFVRDFVPSALAFLMNGEPDIVKNFLLKTLQLQGWEKRVDRFKLGEGVMPASFKVLHDPVRKTDTIIADFGESAIGRVAPVDSGFWWIILLRAYTKSTGDLTLSETPECQRGMRLILSLCLSEGFDTFPTLLCADGCSMVDRRMGVYGYPIEIQALFFMALRCALSMLKPDEEGRDFIERIVKRLHALSFHMRSYFWLDFQQLNDIYRYKTEEYSHTAVNKFNVMPDSIPDWVFDFMPLRGGYFVGNVSPARMDFRWFSLGNCVSILSSLATPDQSMAIMDLLEHRWEELVGEMPLKICYPCIESHEWRIVTGCDPKNTRWSYHNGGSWPVLLWTLTAACIKTGRPQIARRAIDLIESRLHRDCWPEYYDGKQGRYVGKQARKYQTWSIAGYLVAKMMLEDPSHIGMISLEEDKQMKPVIKRSASWTC

SEQ ID NO: 437 - protein, 508 aa, Arabidopsis thaliana
  misc_feature (34)..(501): Pfam name: Invertase_neut Pfam desc: Plant neutral invertase
  misc_feature: Bit score of 1407.0 for HMM based on sequences of Figure 4
  misc_feature: Functional Homolog Of Ceres Annot ID no. 876994 at SEQ ID NO. 315
MSELSTGYVRQDSILEMAHSPGSRSMVDTPLSVRNSFEPHPMVAEAWEALRRSMVFFRGQPVGTIAAYDHASEEVLNYDQVFVRDFVPSALAFLMNGEPDIVKNFLLKTLQLQGWEKRVDRFKLGEGVMPASFKVLHDPVRKTDTIIADFGESAIGRVAPVDSGFWWIILLRAYTKSTGDLTLSETPECQRGMRLILSLCLSEGFDTFPTLLCADGCSMVDRRMGVYGYPIEIQALFFMALRCALSMLKPDEEGRDFIERIVKRLHALSFHMRSYFWLDFQQLNDIYRYKTEEYSHTAVNKFNVMPDSIPDWVFDFMPLRGGYFVGNVSPARMDFRWFSLGNCVSILSSLATPDQSMAIMDLLEHRWEELVGEMPLKICYPCIESHEWRIVTGCDPKNTRWSYHNGGSWPVLLWTLTAACIKTGRPQIARRAIDLIESRLHRDCWPEYYDGKQGRYVGKQARKYQTWSIAGYLVAKMMLEDPSHIGMISLEEDKQMKPVIKRSASWTC

SEQ ID NO: 438 - protein, 544 aa, Arabidopsis thaliana
  misc_feature (76)..(536): Pfam name: Invertase_neut Pfam desc: Plant neutral invertase
  misc_feature: Bit score of 1436.4 for HMM based on sequences of Figure 4
  misc_feature: Functional Homolog Of Ceres Annot ID no. 876994 at SEQ ID NO. 315
MEGVGLRAVGSHCSLSEMDDLDLTRALDKPRLKIERKRSFDERSMSELSTGYSRHDGIHDSPRGRSVLDTPLSSARNSFEPHPMMAEAWEALRRSMVFFRGQPVGTLAAVDNTTDEVLNYDQVFVRDFVPSALAFLMNGEPDIVKHFLLKTLQLQGWEKRVDRFKLGEGVMPASFKVLHDPIRETDNIVADFGESAIGRVAPVDSGFWWIILLRAYTKSTGDLTLSETPECQKGMKLILSLCLAEGFDTFPTLLCADGCSMIDRRMGVYGYPIEIQALFFMALRSALSMLKPDGDGREVIERIVKRLHALSFHMRNYFWLDHQNLNDIYRFKTEEYSHTAVNKFNVMPDSIPEWVFDFMPLRGGYFVGNVGPAHMDFRWFALGNCVSILSSLATPDQSMAIMDLLEHRWAELVGEMPLKICYPCLEGHEWRIVTGCDPKNTRWSYHNGGSWPAACIKTGRPQIARRAVDLIESRLHRDCWPEYYDGKLGRYVGKQARKYQTWSIAGYLVAKMLLEDPSHIGMISLEEDKLMKPVIKRSASWPQL

SEQ ID NO: 439 - protein, 534 aa, Arabidopsis thaliana
  misc_feature (59)..(526): Pfam name: Invertase_neut Pfam desc: Plant neutral invertase
  misc_feature: Bit score of 1436.1 for HMM based on sequences of Figure 4
  misc_feature: Functional Homolog Of Ceres Annot ID no. 876994 at SEQ ID NO. 315
MDDLDLTRALDKPRLKIERKRSFDERSMSELSTGYSRHDGIHDSPRGRSVLDTPLSSARNSFEPHPMMAEAWEALRRSMVFFRGQPVGTLAAVDNTTDEVLNYDQVFVRDFVPSALAFLMNGEPDIVKHFLLKTLQLQGWEKRVDRFKLGEGVMPASFKVLHDPIRETDNIVADFGESAIGRVAPVDSGFWWIILLRAYTKSTGDLTLSETPECQKGMKLILSLCLAEGFDTFPTLLCADGCSMIDRRMGVYGYPIEIQALFFMALRSALSMLKPDGDGREVIERIVKRLHALSFHMRNYFWLDHQNLNDIYRFKTEEYSHTAVNKFNVMPDSIPEWVFDFMPLRGGYFVGNVGPAHMDFRWFALGNCVSILSSLATPDQSMAIMDLLEHRWAELVGEMPLKICYPCLEGHEWRIVTGCDPKNTRWSYHNGGSWPVLLWQLTAACIKTGRPQIARRAVDLIESRLHRDCWPEYYDGKLGRYVGKQARKYQTWSIAGYLVAKMLLEDPSHIGMISLEEDKLMKPVIKRSASWPQL

SEQ ID NO: 440 - protein, 527 aa, Arabidopsis thaliana
  misc_feature (59)..(519): Pfam name: Invertase_neut Pfam desc: Plant neutral invertase
  misc_feature: Bit score of 1401.2 for HMM based on sequences of Figure 4
  misc_feature: Functional Homolog Of Ceres Annot ID no. 876994 at SEQ ID NO. 315
MDDLDLTRALDKPRLKIERKRSFDERSMSELSTGYSRHDGIHDSPRGRSVLDTPLSSARNSFEPHPMMAEAWEALRRSMVFFRGQPVGTLAAVDNTTDEVLNYDQVFVRDFVPSALAFLMNGEPDIVKHFLLKTLQLQGWEKRVDRFKLGEGVMPASFKVLHDPIRETDNIVADFGESAIGRVAPVDSGFWWIILLRAYTKSTGDLTLSETPECQKGMKLILSLCLAEGFDTFPTLLCADGCSMIDRRMGVYGYPIEIQALFFMALRSALSMLKPDGDGREVIERIVKRLHALSFHMRNYFWLDHQNLNDIYRFKTEEYSHTAVNKFNVMPDSIPEWVFDFMPLRGGYFVGNVGPAHMDFRWFALGNCVSILSSLATPDQSMAIMDLLEHRWAELVGEMPLKICYPCLEGHEWRIVTGCDPKNTRWSYHNGGSWPAACIKTGRPQIARRAVDLIESRLHRDCWPEYYDGKLGRYVGKQARKYQTWSIAGYLVAKMLLEDPSHIGMISLEEDKLMKPVIKRSASWPQL

SEQ ID NO: 441 - protein, 558 aa, Coffea arabica
  misc_feature (84)..(551): Pfam name: Invertase_neut Pfam desc: Plant neutral invertase
  misc_feature: Bit score of 1507.2 for HMM based on sequences of Figure 4
  misc_feature: Functional Homolog Of Ceres Annot ID no. 876994 at SEQ ID NO. 315
MECVREYQLRNVSSHCSISEMDDYDLSKLLDKPDKPRLNIERQRSFDERSLSELSIGLSRALDAYETAYSPGRSALDTPVSSARNSFEPHPMVADAWEALRRSLVFFRDQPVGTIAAYDHASEEVLNYDQVFVRDFVPSALAFLMNGEPEIVKNFLLKTLQLQGWEKRIDRFKLGEGAMPASFKVLHDPDRKTDTIVADFGESAIGRVAPVDSGFWWIILLRAYTKSTGDLSLAETPECQKGMRLILSLCLSEGFDTFPTLLCADGCSMIDRRMGIYGYPIEIQALFFMALRCALVMLRHDTEGKEFIERIVKRLHALSFHMRSYFWLDFQQLNDIYRYKTEEYSHTAVNKFNVIPDSILDWVFDFMPTRGGYFIGNVSPARMDMRWFALGNCVAILSCLATAEQAAAIMDLIEARWDELVGEMPMKICYPAIESHEWRIVTGCDPKNTRWSYHNGGSWPVLLWLLTAACIKTGRIQIARRAIDLAESLLLKDSWPEYYDGKLGRYIGKQARKFQTWSIAGYLVAKMMLEDPSHLGMISLEEDKQMKPLIKILLVDLL

SEQ ID NO: 442 - protein, 555 aa, Glycine max
  misc_feature (80)..(548): Pfam name: Invertase_neut Pfam desc: Plant neutral invertase
  misc_feature: Bit score of 1555.6 for HMM based on sequences of Figure 4
  misc_feature: Functional Homolog Of Ceres Annot ID no. 876994 at SEQ ID NO. 315
MDGHMGMRKISSHCSIPDLDDSDILRLLEKPKLNIERQRSFDERSLSELSIGLARAGLDNYDTYSPGGRSGFNTPASSTRNSFEPHPMVADAWESLRKSLVYFRGQPVGTIAAVDHQSEEVLNYDQVFVRDFVPSALAFLMNGEPEIVRNFLLKTLHLQGWEKRVDRFKLGEGVMPASFKVLHDPIRKTDTLIADFGESAIGRVAPVDSGFWWIILLRAYTKSTGDLSLAESPDCQKGMKLILTLCLSEGFDTFPTLLCADGCCMVDRRMGIYGYPIEIQALFFMALRCALSMLKQDDAEGKECVERIVKRLHALSYHMRSYFWLDFQQLNDIYRYKTEEYSHTAVNKFNVIPDSIPDWVFDFMPMRGGYFIGNVSPARMDFRWFALGNCVAILSSLATPEQSMAIMDLIESRWDELVGEMPLKISYPAIESHEWRIVTGCDPKNTRWSYHNGGSWPVLLWLVTAACIKTGRPQIARRAIELAESRLLKDGWPEYYDGKLGRYIGKQARKYQTWSIAGYLVAKMMLEDPSHLGMISLEEDKQMKPVIKRSSSWTC

SEQ ID NO: 443 - protein, 507 aa, Arabidopsis thaliana
  misc_feature (32)..(499): Pfam name: Invertase_neut Pfam desc: Plant neutral invertase
  misc_feature: Bit score of 1346.4 for HMM based on sequences of Figure 4
  misc_feature: Functional Homolog Of Ceres Annot ID no. 876994 at SEQ ID NO. 315
MSELSTGYSRHDGIHDSPRGRSVLDTPLSSARNSFEPHPMMAEAWEALRRSMVFFRGQPVGTLAAVDNTTDEVLNYDQVFVRDFVPSALAFLMNGEPDIVKHFLLKTLQLQGWEKRVDRFKLGEGVMPASFKVLHDPIRETDNIVADFGESAIGRVAPVDSGFWWIILLRAYTKSTGDLTLSETPECQKGMKLILSLCLAEGFDTFPTLLCADGCSMIDRRMGVYGYPIEIQALFFMALRSALSMLKPDGDGREVIERIVKRLHALSFHMRNYFWLDHQNLNDIYRFKTEEYSHTAVNKFNVMPDSIPEWVFDFMPLRGGYFVGNVGPAHMDFRWFALGNCVSILSSLATPDQSMAIMDLLEHRWAELVGEMPLKICYPCLEGHEWRIVTGCDPKNTRWSYHNGGSWPVLLWQLTAACIKTGRPQIARRAVDLIESRLHRDCWPEYYDGKLGRYVGKQARKYQTWSIAGYLVAKMLLEDPSHIGMISLEEDKLMKPVIKRSASWPQL

SEQ ID NO: 444 - protein, 500 aa, Arabidopsis thaliana
  misc_feature (32)..(492): Pfam name: Invertase_neut Pfam desc: Plant neutral invertase
  misc_feature: Bit score of 1311.5 for HMM based on sequences of Figure 4
  misc_feature: Functional Homolog Of Ceres Annot ID no. 876994 at SEQ ID NO. 315
MSELSTGYSRHDGIHDSPRGRSVLDTPLSSARNSFEPHPMMAEAWEALRRSMVFFRGQPVGTLAAVDNTTDEVLNYDQVFVRDFVPSALAFLMNGEPDIVKHFLLKTLQLQGWEKRVDRFKLGEGVMPASFKVLHDPIRETDNIVADFGESAIGRVAPVDSGFWWIILLRAYTKSTGDLTLSETPECQKGMKLILSLCLAEGFDTFPTLLCADGCSMIDRRMGVYGYPIEIQALFFMALRSALSMLKPDGDGREVIERIVKRLHALSFHMRNYFWLDHQNLNDIYRFKTEEYSHTAVNKFNVMPDSIPEWVFDFMPLRGGYFVGNVGPAHMDFRWFALGNCVSILSSLATPDQSMAIMDLLEHRWAELVGEMPLKICYPCLEGHEWRIVTGCDPKNTRWSYHNGGSWPAACIKTGRPQIARRAVDLIESRLHRDCWPEYYDGKLGRYVGKQARKYQTWSIAGYLVAKMLLEDPSHIGMISLEEDKLMKPVIKRSASWPQL

SEQ ID NO: 445 - protein, 562 aa, Lolium perenne
  misc_feature (88)..(555): Pfam name: Invertase_neut Pfam desc: Plant neutral invertase
  misc_feature: Bit score of 1494.5 for HMM based on sequences of Figure 4
  misc_feature: Functional Homolog Of Ceres Annot ID no. 876994 at SEQ ID NO. 315
MEFGAPGGMRRSASHNSLSGSDDFDLTHLLNKPRINVERQRSFDDRSLSDVSYSGGGHARGAGGGFDGMYSPGGGLRSLVGTPASSALHSFEPHPIVGDAWEALRRSLVFFRGQPLGTIAAYDHASEEVLNYDQVFVRDFVPSAMAFLMNGEPEIVKNFLLKTVLLQGWEKKVDRFKLGEGAMPASFKVLHDDKKGVDTLHADFGESAIGRVAPVDSGFWWIILLRAYTKSTGDLTLAEKPECQKAMRLILSLCLSEGFDTFPTLLCADGCCMIDRRMGVYGYPIEIQSLFFMALRCALLMLKHDNEGKDFVERIATRLHALSYHMRSYFWLDFQQLNDIYRYKTEEYSHTAVNKFNVIPDSIPDWLFDFMPCEGGFFVGNVSPARMDFRWFALGNMIAIVSSLATPEQSTAIMDLIEERWEELIGEMPLKICYPAIENHEWRIVTGCDPKNTRWSYHNGGSWPVLLWLLTAASIKTGRPQIARRAIDLAERRLLKDGWPEYYDGKLGKYVGKQARKFQTWSIAGYLVAKMLLEDPSHLGMIALEEDKAMKPVLRRSASWTN

SEQ ID NO: 446 - protein, 560 aa, Triticum aestivum
  misc_feature (85)..(553): Pfam name: Invertase_neut Pfam desc: Plant neutral invertase
  misc_feature: Bit score of 1479.0 for HMM based on sequences of Figure 4
  misc_feature: Functional Homolog Of Ceres Annot ID no. 876994 at SEQ ID NO. 315
  misc_feature (218)..(218): Xaa is any aa, unknown, or other
MELGAAGMRRSASHNSLSGSDDFDLTHLLNKPRINVERQRSFDDRSLSDVSYSGGHARGGGGFDGMYSPGGGLRSLVGTPASSALHSFEPHPIVGDAWEALRRSLVFFRGQPLGTIAAFDHASEEVLNYDQVFVRDFVPSAMAFLMNGEPEIVKNFLLKTVLLQGWEKKVDRFKLGEGAMPASFKVLHDDKKGVDTLHADFGESAIGRVAPVDSGFWXWIILLRAYTKSTGNLTLAERPECQKAMRLILSLCLPEGFDTFPTLLCADGCCMIDRRMGVYGYPIEIQSLFFMALRCALLMLKHDAEGKDFVERIATRLHALSYHMRSYFWLDFQQLNDIYRYKTEEYSHTAVNKFNVIPDSIPDWLFDFMPCEGGFFVGNVSPARMDFRWFALGNMIAIVSSLATPEQSMAIMDLIEERWEELIGEMPLKICYPAIENHEWRIVTGCDPKNTRWSYHNGGSWPVLLWLLTAASIKTGRPQIARRAIDLAERRLLKDGWPEYYDGKLGKYVGKQARKFQTWSIAGYLVAKMLLEDPSHLGMIALEEDKAMKPVLRRSASWTN

SEQ ID NO: 447 - protein, 527 aa, Arabidopsis thaliana
  misc_feature (61)..(521): Pfam name: Invertase_neut Pfam desc: Plant neutral invertase
  misc_feature: Bit score of 1410.4 for HMM based on sequences of Figure 4
  misc_feature: Functional Homolog Of Ceres Annot ID no. 876994 at SEQ ID NO. 315
MEGVNSSSSISDLDELARLLDRPRVNIERKRSFDERSFSEMGIFDNVNSPGGWETPVSSARNSFEPHPMVAEAWDALRRSLVYFRGQPVGTIAAYDHATEEVLNYDQVFVRDFVPSALAFLMNGEPDIVKNFLLKTIQIQGREKRIDRFKLGEGAMPASFKVIHDPIKETDSINADFGESAIGRVAPVDSGFWWIILLRAYTKSTGDTSLAETSECQKGMRLILSLCLSEGFDTFPTLLCADGCSMIDRRMGVYGYPIEIQALFFMALRSAMSMLKHDAEGKEFMERIVKRLHALSFHMRSYFWLDFQQLNDIYRYKTEEYSHTAVNKFNVIPDSIPEWVFDFMPLRGGYFIGNVSPARMDFRWFALGNCVAILASLATPEQSASIMDLIEERWEELVGEMPVKICHPAIESHEWRIVTGCDPKNTRWSYHNGGSWPAACIKTGRPQIARRAIDLAEARLLKDGWPEYYDGKSGRFIGKQARKFQTWSIAGYLVAKMLLEDPSHLGMISLEEDKQTKPVIKRSYSWT

SEQ ID NO: 448 - protein, 550 aa, Arabidopsis thaliana
  misc_feature (77)..(544): Pfam name: Invertase_neut Pfam desc: Plant neutral invertase
  misc_feature: Bit score of 1382.0 for HMM based on sequences of Figure 4
  misc_feature: Functional Homolog Of Ceres Annot ID no. 876994 at SEQ ID NO. 315
MSSLCENGKKKEGIRAVNSMCSISELTDEDLLSRLLDRPRLKLERKISYEEMSLSLYDSAHSLDGKSGWDTPVFSMKDSMDRNPMVTEAWEALCQSQVYFRGKPVGTIAAYDHASEEVLNYDQVFVRDFVPSALAFLMNGEPEIVKNFLLKTLHIQGQDKMIDKFKLGDGAMPASFKVLHNPIKKTDTIIADFGESAIGRVAPVDSGFWWIILLRAYTKSTGDHSLAERPECQKGMRLILSLCLSEGFDTFPTLLCADGCSMVDRRMGIYGYPIEIQALFFMALRSALSMLKHDSEGKEFMEKIVKRLHALSFHMRSYFWLDFQQLNDIYRYKTEEYSHTAVNKFNVIPDSIPDWIFDFMPLRGGYFVGNVSPARMDFRWFALGNCIAILSSLATPEQSMAIMDLIEARWEELVGEMPLKICYPAMESHEWGIVTGCDPKNTRWSYHNGGSWPVLLWLLTAASIKTGRPQIARRAIELAEARLLKDGWPEYYDGKSGRFIGKQARKSQTWSIAGYLVAKMMMDDPTHVGMISMEEEKHMKPPLRRSSSWT

SEQ ID NO: 449 - protein, 531 aa, Arabidopsis thaliana
  misc_feature (58)..(525): Pfam name: Invertase_neut Pfam desc: Plant neutral invertase
  misc_feature: Bit score of 1366.5 for HMM based on sequences of Figure 4
  misc_feature: Functional Homolog Of Ceres Annot ID no. 876994 at SEQ ID NO. 315
MCSISELTDEDLLSRLLDRPRLKLERKISYEEMSLSLYDSAHSLDGKSGWDTPVFSMKDSMDRNPMVTEAWEALCQSQVYFRGKPVGTIAAYDHASEEVLNYDQVFVRDFVPSALAFLMNGEPEIVKNFLLKTLHIQGQDKMIDKFKLGDGAMPASFKVLHNPIKKTDTIIADFGESAIGRVAPVDSGFWWIILLRAYTKSTGDHSLAERPECQKGMRLILSLCLSEGFDTFPTLLCADGCSMVDRRMGIYGYPIEIQALFFMALRSALSMLKHDSEGKEFMEKIVKRLHALSFHMRSYFWLDFQQLNDIYRYKTEEYSHTAVNKFNVIPDSIPDWIFDFMPLRGGYFVGNVSPARMDFRWFALGNCIAILSSLATPEQSMAIMDLIEARWEELVGEMPLKICYPAMESHEWGIVTGCDPKNTRWSYHNGGSWPVLLWLLTAASIKTGRPQIARRAIELAEARLLKDGWPEYYDGKSGRFIGKQARKSQTWSIAGYLVAKMMMDDPTHVGMISMEEEKHMKPPLRRSSSWT

SEQ ID NO: 450 - protein, 573 aa, Vitis vinifera
  misc_feature (99)..(566): Pfam name: Invertase_neut Pfam desc: Plant neutral invertase
  misc_feature: Bit score of 1445.0 for HMM based on sequences of Figure 4
  misc_feature: Functional Homolog Of Ceres Annot ID no. 876994 at SEQ ID NO. 315
MSELSPKLAQNGTIKNIDSSSTVAETEDIDFSKLSERPRPLTMERQRSYDERSFLSELSVGMSPRLSIRNIDSYSRNIDHLDTVFSPCRRSGFNTPRSAMDFEPHPMFAEAWEGLRRSLVFFRGKPVGTIAALDNSDEELNYDQVVFVRDFVPSALAFLMNGEPEIVRNFLVKTLRLQSWEKKVDRFQLGEGVMPASFKVLHDPVRNSDTLIADFGESAIGRVAPVDSGFWWIILLRAYTKSTGDSTLAELPECQKGMRLILTLCLSEGFDTFPTLLCADGCCMIDRRMGVYGYPIEIQALFFMALRCALLLLKQDDQGKEFIERIVKRLHALSYHMRSYFWLDMKQLNDIYRYKTEEYSHTAVNKFNVIPDSIPEWIFDFMPTYGGYFIGNVSPARMDFRWFCLGNCVAILSSLATPEQSTAIMDLIESRWEELVGDMPLKVCYPAIEGHEWRIVTGCDPKNTRWSYHNGGSWPVLLWLLTAACIKTGRPQIARRAIELAESRLVKDSWPEYYDGKLGRFIGKQARKFQTWSVAGYLVAKMMLEDPSHLGMISLEEDKQMKPLIKRSASWTF

SEQ ID NO: 451 - protein, 494 aa, Arabidopsis thaliana
  misc_feature (21)..(488): Pfam name: Invertase_neut Pfam desc: Plant neutral invertase
  misc_feature: Bit score of 1334.2 for HMM based on sequences of Figure 4
  misc_feature: Functional Homolog Of Ceres Annot ID no. 876994 at SEQ ID NO. 315
MGIFDNVNSPGGWETPVSSARNSFEPHPMVAEAWDALRRSLVYFRGQPVGTIAAYDHATEEVLNYDQVFVRDFVPSALAFLMNGEPDIVKNFLLKTIQIQGREKRIDRFKLGEGAMPASFKVIHDPIKETDSINADFGESAIGRVAPVDSGFWWIILLRAYTKSTGDTSLAETSECQKGMRLILSLCLSEGFDTFPTLLCADGCSMIDRRMGVYGYPIEIQALFFMALRSAMSMLKHDAEGKEFMERIVKRLHALSFHMRSYFWLDFQQLNDIYRYKTEEYSHTAVNKFNVIPDSIPEWVFDFMPLRGGYFIGNVSPARMDFRWFALGNCVAILASLATPEQSASIMDLIEERWEELVGEMPVKICHPAIESHEWRIVTGCDPKNTRWSYHNGGSWPVLLWLLTAACIKTGRPQIARRAIDLAEARLLKDGWPEYYDGKSGRFIGKQARKFQTWSIAGYLVAKMLLEDPSHLGMISLEEDKQTKPVIKRSYSWT

SEQ ID NO: 452 - protein, 552 aa, Lolium perenne
  misc_feature (91)..(552): Pfam name: Invertase_neut Pfam desc: Plant neutral invertase
  misc_feature: Bit score of 1347.9 for HMM based on sequences of Figure 4
  misc_feature: Functional Homolog Of Ceres Annot ID no. 876994 at SEQ ID NO. 315
MEAPGGGAGPMPTTPSHASIADSDDFDLSRLLNHRPRINVERQRSFDDRSLGDLYLSAMDSRGGYMDSYDSMYSPGGGLRSLTGTPASSTRLSFEPQLLVAEAWEALRRSLVCFRGEPLGTIAAVDSSSDEVLNYDQVFVRDFVPSALAFLMNGEPDIVKNFLLKTLLLQGWEKRIDRFKLGEGAMPASFKVLKDPKRGVDTLAADFGESAIGRVAPADSGFWWIILLRAYTKSTGDLTLAETPECQKGIRLIMNQCLAEGFDTFPTLLCADGCCMIDRRMGVYGYPIEIQALFFMSLRCALLLLKPAVEGNSSSKDDDIMERIVTRLHALSYHMRSYFWLDFQQLNVIYRFKTEEYSHTAVNKFNVIPESIPDWLFDFMPSRGGYFVGNVSPARMDFRWFALGNCVAILASLATPEQAGAIMDLIEERWEDLIGEMPLKICYPTIEGHEWQNVTGCDPKNTRWSYHNGGSWPVLIWLLTAACIKTGRLKIARRAIDLAEARLGKDGWPEYYDGKLGRYVGKQARKHQTWSIAGYLVAKMMLEDPSHLGMIS

SEQ ID NO: 453 - protein, 548 aa, Oryza sativa
  misc_feature (74)..(541): Pfam name: Invertase_neut Pfam desc: Plant neutral invertase
  misc_feature (153)..(516): Pfam name: GDE_C Pfam desc: Amylo-alpha-1,6-glucosidase
  misc_feature: Bit score of 1443.9 for HMM based on sequences of Figure 4
  misc_feature: Functional Homolog Of Ceres Annot ID no. 876994 at SEQ ID NO. 315
MKRVSSHVSIASEAEINLDLSRLLIDKPRLTLERKRSFDEQSWSELSHRQNDGFDSIMHSPAFPSGFDSPFSLGTLGDPHPLVNEAWEALRKSVVYFRGQPVGTIAAVDHASEEVLNYDQVFVRDFFPSALAFLMNNETDIVKNFLLKTLHLQSSEKMVDRFKLGAGAMPASFKVDRNRNRNTETLVADFGESAIGRVAPVDSGFWWIILLRAYTKYTADTSLAESPECQNCMRLILNLCLSEGFDTFPTLLCTDGCSMMDRRMGIYGYPIEIQALFYMALRCALQMLKPDGEGKDFIEKIGQRLHALTYHMRNYFWLDFPHLNNIYRYKTEEYSHTAVNKFNVIPDSIPDWVFDFMPCRGGYFLGNVSPAMMDFRWFALGNCIAIISSLATPEQSVAIMDLIEERWEELVGEMPLKICYPAIENHEWRIITGCDPKNTRWSYHNGGSWPVLLWLLTAACIKTGRPQMAKRAIELAESRLLKDGWPEYYDGKLGRFIGKQARKFQTWSIAGYLVARMMLEDPSTLMMISMEEDRPVKPTMRRSASWNA

SEQ ID NO: 454 - protein, 550 aa, Zea mays
  misc_feature (76)..(543): Pfam name: Invertase_neut Pfam desc: Plant neutral invertase
  misc_feature: Bit score of 1417.7 for HMM based on sequences of Figure 4
  misc_feature: Functional Homolog Of Ceres Annot ID no. 876994 at SEQ ID NO. 315
MKRVSSHVSLASEAEINLDLSRLIIDKPRFTLERKRSFDEQSWSELSHRQNDGFDSVLQSPAFPSGVFDSPFSVGTHFGGPHPLVNEAWEALRKSVVYFREQPVGTIAAVDHASEEVLNYDQVFVRDFVPSALAFLMNNETDIVKNFLLKTLHLQSSEKMVDRFKLGAGAMPASFKVDRNKNRNTETLVADFGESAIGRVAPVDSGFWWIILLRAYKSTPGDVSLSESPECQKCMRLILNLCLSEGFDTFPTLLCTDGCSMIDLHEGIYGYPIEIQALFYMALRCALQMLKPEGEGKDFIEKIGQRLHALTYHMRNYFWLDFHQLNNIYRYKTEEYSHTAVNKFNVIPDSIPDWVFDFMPCRGGYFLGNVSPAMMDFRWFALGNCIAIVSSLATPEQSVAIMDLIEEKWDELVGEMPLKICYPALENHEWRIITGCDPKNTRWSYHNGGSWPVLLWLLTAACIKTGRPQMAKRAIELAESRLLKDGWPEYYDGKLGRFVGKQARKFQTWSIAGYLVARMMLEDPSTLMMISMEEDRPVKPTMRRSASWNA

SEQ ID NO: 455 - protein, 554 aa, Lolium perenne
  misc_feature (80)..(547): Pfam name: Invertase_neut Pfam desc: Plant neutral invertase
  misc_feature: Bit score of 1454.7 for HMM based on sequences of Figure 4
  misc_feature: Functional Homolog Of Ceres Annot ID no. 876994 at SEQ ID NO. 315
MKRVSSHVSIASEAEINLDLSRLLIDKPRYTLERKRSFDEQSWSELTHTHRQNDGFDSVLQSPAFRTGFDSPFSMGTHFGEPSGPHPLVNEAWEALRKSVVYFRGQPVGTIAAVDHASEEVLNYDQVFVRDFVPSALAFLMNNEPEIVKNFLLKTLHLQSSEKMVDRFKLGAGAMPASFKVDRNKSRNTETLVADFGESAIGRVAPVDSGFWWIILLRAYTKYTGDASLSESPDCQKCMRLILNLCLSEGFDTFPTLLCTDGCSMIDRRMGIYGYPIEIQALFYMALRCALQMLKPDGEGKDFIEKIGQRLHALTYHMRNYFWLDFPHLNNIYRYKTEEYSHTAVNKFNVIPDSIPDWVFDFMPCRGGYFLGNVSPAMMDFRWFALGNCIAIISSLATPEQSSAIMDLIEERWDELVGEVPLKICYPAIENHEWRIITGCDPKNTRWSYHNGGSWPVLLWLLTAACIKTGRPQMAKRAIELSEARLLKDGWPEYYDGKLGKFVGKQARKFQTWSIAGYLVARMMLEDPSTLMMISMEEDRPVKPTMRRSASWNA

SEQ ID NO: 456 - protein, 414 aa, Arabidopsis thaliana
  misc_feature (1)..(407): Pfam name: Invertase_neut Pfam desc: Plant neutral invertase
  misc_feature: Bit score of 1057.7 for HMM based on sequences of Figure 4
  misc_feature: Functional Homolog Of Ceres Annot ID no. 876994 at SEQ ID NO. 315
MNGEPDIVKNFLLKTLQLQGWEKRVDRFKLGEGVMPASFKVLHDPVRKTDTIIADFGESAIGRVAPVDSGFWWIILLRAYTKSTGDLTLSETPECQRGMRLILSLCLSEGFDTFPTLLCADGCSMVDRRMGVYGYPIEIQALFFMALRCALSMLKPDEEGRDFIERIVKRLHALSFHMRSYFWLDFQQLNDIYRYKTEEYSHTAVNKFNVMPDSIPDWVFDFMPLRGGYFVGNVSPARMDFRWFSLGNCVSILSSLATPDQSMAIMDLLEHRWEELVGEMPLKICYPCIESHEWRIVTGCDPKNTRWSYHNGGSWPVLLWTLTEACIKTGRPQIARRAIDLIESRLHRDCWPEYYDGKQGRYVGKQARKYQTWSIAGYLVAKMMLEDPSHIGMISLEEDKQMKPVIKRSASWTC

SEQ ID NO: 457 - protein, 488 aa, Sorghum bicolor
  misc_feature (13)..(481): Pfam name: Invertase_neut Pfam desc: Plant neutral invertase
  misc_feature: Bit score of 1329.0 for HMM based on sequences of Figure 4
  misc_feature: Functional Homolog Of Ceres Annot ID no. 876994 at SEQ ID NO. 315
LRSLVGTPASSALHSFEPHPIVGDAWEALRRSLVFFRGQPLGTVAAVDHASEEVLNYDQVFVRDFVPSALAFLMNGEPDIVKNFLLKTLLLQGWEKKVDRFKLGEGAMPASFKVMHDAKKGVETLHADFGESAIGRVAPVDSGFWWIILLRAYTKTTGDMTLAETPECQKGMRLILSLCLSEGFDTFPTLLCADGCCMIDRRMGVYGYPIEIQARGFMALRCALQMLKHDNEGKEFVEKIATRLHALSYHMRSYFWLDFQQLNDIYRYKTEEYSHTAVNKFNVIPDSIPDWLFDFMPCQGGFFIGNVSPARMDFRWFALGNMIAILSSLATPEQSVAIMDLIEERWEELIGDMPLKICYPAIENHEWRIVTGCDPKNTRWSYHNGGSWPVLLWLLTAACIKTGRPQIARRAIDLAERRLLKDGWPEYYDGKLGRYVGKQARKFQTWSIAGYLVAKMMLEDPSHLGMISLEEDKAMLKPVLKRSASWTN

SEQ ID NO: 458 - protein, 466 aa, Arabidopsis thaliana
  misc_feature (1)..(460): Pfam name: Invertase_neut Pfam desc: Plant neutral invertase
  misc_feature: Bit score of 1253.1 for HMM based on sequences of Figure 4
  misc_feature: Functional Homolog Of Ceres Annot ID no. 876994 at SEQ ID NO. 315
MVAEAWDALRRSLVYFRGQPVGTIAAYDHATEEVLNYDQVFVRDFVPSALAFLMNGEPDIVKNFLLKTIQIQGREKRIDRFKLGEGAMPASFKVIHDPIKETDSINADFGESAIGRVAPVDSGFWWIILLRAYTKSTGDTSLAETSECQKGMRLILSLCLSEGFDTFPTLLCADGCSMIDRRMGVYGYPIEIQALFFMALRSAMSMLKHDAEGKEFMERIVKRLHALSFHMRSYFWLDFQQLNDIYRYKTEEYSHTAVNKFNVIPDSIPEWVFDFMPLRGGYFIGNVSPARMDFRWFALGNCVAILASLATPEQSASIMDLIEERWEELVGEMPVKICHPAIESHEWRIVTGCDPKNTRWSYHNGGSWPVLLWLLTAACIKTGRPQIARRAIDLAEARLLKDGWPEYYDGKSGRFIGKQARKFQTWSIAGYLVAKMLLEDPSHLGMISLEEDKQTKPVIKRSYSWT

SEQ ID NO: 459 - protein, 536 aa, Physcomitrella patens subsp. patens
  misc_feature (63)..(529): Pfam name: Invertase_neut Pfam desc: Plant neutral invertase
  misc_feature: Bit score of 1297.6 for HMM based on sequences of Figure 4
  misc_feature: Functional Homolog Of Ceres Annot ID no. 876994 at SEQ ID NO. 315
MESRPRQIETHHSLDERSLNDIISSGLSSPRPPRQLETVKSSECLEALLSPSIRSSAGTPREHHAFEPHPMIADAWEALRRSMVFFRSKPVGTIAALDPTEDSLNYNQVFVRDFVPSALAFLMNGEPEIVKNFLLKTLRLQSIEKRIDCFTLGEGVMPASFKVLHDPVRKTDTMIADFGESAIGRVAPVDSGFWWIILLRAYTKSTGDHTLADMPDCQRGMRLILTLCLADGFDTFPTLLCADGCCMVDRRMGIYGYPIEIQSLFFMALRSAKSLIKAEGDGKEFLERIDKRLHALSFHIREYFWLDHQQLNNIYRFKTEEYSHTAVNKFNVIPDSIPDWIFDFLPLKGGFFIGNVSPARMDFRWFAIGNFMAILSSLATSEQASAIMDLLEARWTELVGDMPLKVSYPAMEGHEWRIVTGCDPKNTRWSYHNAGSWPVILWMLTAACIKAGRPQIARRAIEQVETRLAKDGWPEYYDGKLGRYVGKQARKFQTWSIAGYLVAKMMLEDPSHLGMIGLEEDKKMKPSLTRSASWTA

SEQ ID NO: 460 - protein, 537 aa, Physcomitrella patens subsp. patens
  misc_feature (63)..(530): Pfam name: Invertase_neut Pfam desc: Plant neutral invertase
  misc_feature: Bit score of 1276.9 for HMM based on sequences of Figure 4
  misc_feature: Functional Homolog Of Ceres Annot ID no. 876994 at SEQ ID NO. 315
MDLKPRQIETQLSLDERSINDIISSGLSSPRPPRQLETAKSSECLEALLSPSIRSSAGTPREYHAFEPHPMIADAWERLRLSMVFYRSRPVGTIAALDPEEDSLNYNQVFVRDFVPSALAFLMNGEPEIVKNFLLRTLQLQSVEKRIDCFTLGEGVMPASFKVLHDPVRKTDTMIADFGESAIGRVAPVDSGFWWIILLRAYTKSTGDYTLADMPDCQRGMRLILYLCLADGFDTFPTLLCADGCCMVDRRMGIYGYPIEIQSLFFMALRSAKSLIKADGDGKEFLEKIDKRLHALSYHMREYFWLDHQQLNNIYRFKTEEYSHTAVNKFNVIPDSIPDWIFDFLPLKGGFFIGNVSPARMDFRWFAIGNFMAILGSLATADQASAIMDLLEARWPELVGDMPLKVSYPAMEGHEWRIITGCDPKNTRWSYHNAGSWPVILWMLTAACIKAGRPQIARRAIEQVETRLSADGWPEYYDGKLGRYVGKQARKFQTWSIAGYLVAKMMLEDPSHLGMIGLEEDKKIQKPSLTRSASWTA

SEQ ID NO: 461 - protein, 559 aa, Zea mays
  misc_feature (84)..(552): Pfam name: Invertase_neut Pfam desc: Plant neutral invertase
  misc_feature: Bit score of 1265.4 for HMM based on sequences of Figure 4
  misc_feature: Functional Homolog Of Ceres Annot ID no. 876994 at SEQ ID NO. 315
  misc_feature (131)..(131): Xaa is any aa, unknown, or other
  misc_feature (138)..(138): Xaa is any aa, unknown, or other
  misc_feature (163)..(163): Xaa is any aa, unknown, or other
  misc_feature (180)..(180): Xaa is any aa, unknown, or other
  misc_feature (190)..(190): Xaa is any aa, unknown, or other
  misc_feature (199)..(199): Xaa is any aa, unknown, or other
  misc_feature (208)..(208): Xaa is any aa, unknown, or other
  misc_feature (214)..(214): Xaa is any aa, unknown, or other
MELAVGGGMRRSASHTSLSESDDFELTRLLSKPRINVERQRSFDDHSLSDVSHSGGYGRGGFDGMYSPGGGLRSLVGTPASSALHSFEPHPIVGDAWEALRRSLVFFRGQPLGTVAAVDHAVEEVLGNDAXLASGFCXDARKGVETLHADFGESAIGRVAPVXGCVVDHTRFKLGEGACXGSFKVMHDAXKGVETLMLXFGESALGGXAPVDFXFWWIILLRAYTKTTGDLTLAETPECQKGMRLILSLCLSEGFDTFPTLLCADGCCMIDRRMGVYGYPIEIQALFFMALRCALQMLKHDNEGKEFVEKIATRLHALSYHMRSYFWLDFQQLNDIYRYKTEEYSHTAVNKFNVIPDSIPDWLFDFMPCQGGFFIGNVSPARMDFRWFALGNMIAILSSLATPEQSVAIMDLIEERWEELIGEMPLKICYPAIENHEWRIVTGCDPKNTRWSYHNGGSWPVLLWLLTAACIKTGRPQIARRAIDLAERRLLKDGWPEYYDGKLGRYVGKQARKFQTWSIAGYLVAKMMLEDPSHLGMISLEEDRAMLKPVLKRSASWTN

SEQ ID NO: 462 - protein, 475 aa, Arabidopsis thaliana
  misc_feature (2)..(469): Pfam name: Invertase_neut Pfam desc: Plant neutral invertase
  misc_feature: Bit score of 1248.2 for HMM based on sequences of Figure 4
  misc_feature: Functional Homolog Of Ceres Annot ID no. 876994 at SEQ ID NO. 315
MKDSMDRNPMVTEAWEALCQSQVYFRGKPVGTIAAYDHASEEVLNYDQVFVRDFVPSALAFLMNGEPEIVKNFLLKTLHIQGQDKMIDKFKLGDGAMPASFKVLHNPIKKTDTIIADFGESAIGRVAPVDSGFWWIILLRAYTKSTGDHSLAERPECQKGMRLILSLCLSEGFDTFPTLLCADGCSMVDRRMGIYGYPIEIQALFFMALRSALSMLKHDSEGKEFMEKIVKRLHALSFHMRSYFWLDFQQLNDIYRYKTEEYSHTAVNKFNVIPDSIPDWIFDFMPLRGGYFVGNVSPARMDFRWFALGNCIAILSSLATPEQSMAIMDLIEARWEELVGEMPLKICYPAMESHEWGIVTGCDPKNTRWSYHNGGSWPVLLWLLTAASIKTGRPQIARRAIELAEARLLKDGWPEYYDGKSGRFIGKQARKSQTWSIAGYLVAKMMMDDPTHVGMISMEEEKHMKPPLRRSSSWT

SEQ ID NO: 463 - protein, 471 aa, Arabidopsis thaliana
  misc_feature (1)..(465): Pfam name: Invertase_neut Pfam desc: Plant neutral invertase
  misc_feature: Bit score of 1240.1 for HMM based on sequences of Figure 4
  misc_feature: Functional Homolog Of Ceres Annot ID no. 876994 at SEQ ID NO. 315
MDRNPMVTEAWEALCQSQVYFRGKPVGTIAAYDHASEEVLNYDQVFVRDFVPSALAFLMNGEPEIVKNFLLKTLHIQGQDKMIDKFKLGDGAMPASFKVLHNPIKKTDTIIADFGESAIGRVAPVDSGFWWIILLRAYTKSTGDHSLAERPECQKGMRLILSLCLSEGFDTFPTLLCADGCSMVDRRMGIYGYPIEIQALFFMALRSALSMLKHDSEGKEFMEKIVKRLHALSFHMRSYFWLDFQQLNDIYRYKTEEYSHTAVNKFNVIPDSIPDWIFDFMPLRGGYFVGNVSPARMDFRWFALGNCIAILSSLATPEQSMAIMDLIEARWEELVGEMPLKICYPAMESHEWGIVTGCDPKNTRWSYHNGGSWPVLLWLLTAASIKTGRPQIARRAIELAEARLLKDGWPEYYDGKSGRFIGKQARKSQTWSIAGYLVAKMMMDDPTHVGMISMEEEKHMKPPLRRSSSWT

SEQ ID NO: 464 - protein, 611 aa, Glycine max
  misc_feature (143)..(606): Pfam name: Invertase_neut Pfam desc: Plant neutral invertase
  misc_feature: Bit score of 1301.0 for HMM based on sequences of Figure 4
  misc_feature: Functional Homolog Of Ceres Annot ID no. 876994 at SEQ ID NO. 315
GFFFHFCNIYVRFGNTLLSLSFLLFLPLLGLLITTTVVTILFLAVKNLEISSFTMDWCQNQNGSFKSTDALCIAAEADEEELDFTKVDKPRPIERCKSCEVRSLSELSKVSENSSYSIDHLDKAASLQPKSGMNTPGSLVLDPQSHPIVSEGWEALMRSLVYFRGQRVGTIAAMDSSDEKINYDQVFVRDFVPSALAFLMKGEPEIVRNFILKTLRLQSWEKMIDKFHLAEGVMPASFKVLHDPVRNHETLIADFGESAIGRVAPIDSGFWWIILLRAYTKSTGDNSLAELPECQKGMRLILNLCLSEGFDTFPTLLCADGCCMIDRRMGVYGYPIEIQALFFMALRCALILLKEDAEGEEFRERITKRLHALSYHLRSYFWLDLKQLNNVYRFKTEEYSHTAVNKFNVIPDSLPDWIFDFMPLKGGYFIGNVSPARMDFRWFCLGNCIAILSSLATPEQSIAIMDLIESRWQELIGEMPLKVCYPALENHEWRIITGCDPKNTRWSYHNGGSWPVLLWLLAAASIKTGRPQIAKRALEIVETRLFKDNWPEYYDGKLGRYIGKQARKCQTWSIAGYLVAKMLLDDPSHLGMVALEEDKHQKPVLRRSNSL

SEQ ID NO: 465 - protein, 508 aa, Zea mays
  misc_feature (84)..(508): Pfam name: Invertase_neut Pfam desc: Plant neutral invertase
  misc_feature: Bit score of 1226.7 for HMM based on sequences of Figure 4
  misc_feature: Functional Homolog Of Ceres Annot ID no. 876994 at SEQ ID NO. 315
  misc_feature (206)..(206): Xaa is any aa, unknown, or other
  misc_feature (214)..(214): Xaa is any aa, unknown, or other
  misc_feature (223)..(223): Xaa is any aa, unknown, or other
  misc_feature (326)..(326): Xaa is any aa, unknown, or other
  misc_feature (451)..(451): Xaa is any aa, unknown, or other
  misc_feature (480)..(480): Xaa is any aa, unknown, or other
MELAVGGGMRRSASHTSLSESDDFELTRLLSKPRINVERQRSFDDRSLSDVSHSGGYSRGGFDGMYSPGGGLRSLVGTPASSGLHSFEPHPIVGDAWEALRRSLVLFRGQPLGTVAAVDHASEEVLNYDQVFVRDFVPSALAFLMNGEPDIVKNFLLKTLLLQGWERKVDRFKLGEGAMPASFKVMHDAKKGVETLHADFGESAIXGRGAPVGXSGFWWIILXLGAYTKTTGDLTLAETPECQKGMRLILSLCLSEGFDTFPTLLCADGCCMIDRRMGVYGYPIEIQALFFMALRCALQMLKHDNEGKEFVEKIATRLHALSYHMXRSYFWLDFQQLNDIYRYKTEEYSHTAVNKFNVIPDSIPDWLFDFMPCQGGFFVGNVSPARMDFRWFALGNMIAILSSLATPEQSNAIMDLIEERWEELIGEMPLKICYPAIENHEWRIVTGCDPXNTRWSYHNGGSWPVLLWLLTAACIKTGRXQIARRAIDLAERRLLKDGCPEYYDGKLG

SEQ ID NO: 466 - protein, 466 aa, Arabidopsis thaliana
  misc_feature (1)..(459): Pfam name: Invertase_neut Pfam desc: Plant neutral invertase
  misc_feature: Bit score of 1246.0 for HMM based on sequences of Figure 4
  misc_feature: Functional Homolog Of Ceres Annot ID no. 876994 at SEQ ID NO. 315
MVGEAWDALRRSMVYFRGQPVGTIAAVDNSEEKLNYDQVFVRDFVPSALAFLMNGEPDIVKNFLLKTLRLQSWEKKIDRFQLGEGVMPASFKVFHDPVRNHETLIADFGESAIGRVAPVDSGFWWIILLRAYTKSTGDSSLADMPECQKGIRLILSLCLSEGFDTFPTLLCADGCCMIDRRMGVYGYPIEIQALFFMALRCALLLLKHDGEGKEMVEQIVKRLHALSYHMRSYFWLDLKQLNDIYRYKTEEYSHTAVNKFNVIPDSLPEWVFDFMPPHGGFFIGNVSPARMDFRWFALGNCIAILSSLATPEQSTAIMDLIESRWEELVGEMPLKVCYPAIESHEWRIVTGCDPKNTRWSYHNGGSWPVLLWLLTAACIKTGRPQIARRAIEVAEARLHKDHWPEYYDGKVGRYVGKQSRKNQTWSVAGYLVAKMMLEDPSHVGMVCLEEDKQMKPVMRRSNSWTC

SEQ ID NO: 467 - protein, 524 aa, Arabidopsis thaliana
  misc_feature (61)..(490): Pfam name: Invertase_neut Pfam desc: Plant neutral invertase
  misc_feature: Bit score of 1108.4 for HMM based on sequences of Figure 4
  misc_feature: Functional Homolog Of Ceres Annot ID no. 876994 at SEQ ID NO. 315
MEGVNSSSSISDLDELARLLDRPRVNIERKRSFDERSFSEMGIFDNVNSPGGWETPVSSARNSFEPHPMVAEAWDALRRSLVYFRGQPVGTIAAYDHATEEVLNYDQVFVRDFVPSALAFLMNGEPDIVKNFLLKTIQIQGREKRIDRFKLGEGAMPASFKVIHDPIKETDSINADFGESAIGRVAPVDSGFWWIILLRAYTKSTGDTSLAETSECQKGMRLILSLCLSEGFDTFPTLLCADGCSMIDRRMGVYGYPIEIQALFFMALRSAMSMLKHDAEGKEFMERIVKRLHALSFHMRSYFWLDFQQLNDIYRYKTEEYSHTAVNKFNVIPDSIPEWVFDFMPLRGGYFIGNVSPARMDFRWFALGNCVAILASLATPEQSASIMDLIEERWEELVGEMPVKICHPAIESHEWRIVTGCDPKNTRWSYHNGGSWPGSIVVAINSCMHKDGTATNSKTGHRPGGSTAVEGWLAGVLRREIRKVHRKTGEEVSDMVYRRLLGRQDVVGRSFSSWNDLIGRRQTD

SEQ ID NO: 468 - protein, 454 aa, Arabidopsis thaliana
  misc_feature (1)..(447): Pfam name: Invertase_neut Pfam desc: Plant neutral invertase
  misc_feature: Bit score of 1200.1 for HMM based on sequences of Figure 4
  misc_feature: Functional Homolog Of Ceres Annot ID no. 876994 at SEQ ID NO. 315
MVYFRGQPVGTIAAVDNSEEKLNYDQVFVRDFVPSALAFLMNGEPDIVKNFLLKTLRLQSWEKKIDRFQLGEGVMPASFKVFHDPVRNHETLIADFGESAIGRVAPVDSGFWWIILLRAYTKSTGDSSLADMPECQKGIRLILSLCLSEGFDTFPTLLCADGCCMIDRRMGVYGYPIEIQALFFMALRCALLLLKHDGEGKEMVEQIVKRLHALSYHMRSYFWLDLKQLNDIYRYKTEEYSHTAVNKFNVIPDSLPEWVFDFMPPHGGFFIGNVSPARMDFRWFALGNCIAILSSLATPEQSTAIMDLIESRWEELVGEMPLKVCYPAIESHEWRIVTGCDPKNTRWSYHNGGSWPVLLWLLTAACIKTGRPQIARRAIEVAEARLHKDHWPEYYDGKVGRYVGKQSRKNQTWSVAGYLVAKMMLEDPSHVGMVCLEEDKQMKPVMRRSNSWTC

SEQ ID NO: 469 - protein, 380 aa, Arabidopsis thaliana
  misc_feature (1)..(373): Pfam name: Invertase_neut Pfam desc: Plant neutral invertase
  misc_feature: Bit score of 908.8 for HMM based on sequences of Figure 4
  misc_feature: Functional Homolog Of Ceres Annot ID no. 876994 at SEQ ID NO. 315
MPASFKVLHDPVRKTDTIIADFGESAIGRVAPVDSGFWWIILLRAYTKSTGDLTLSETPECQRGMRLILSLCLSEGFDTFPTLLCADGCSMVDRRMGVYGYPIEIQALFFMALRCALSMLKPDEEGRDFIERIVKRLHALSFHMRSYFWLDFQQLNDIYRYKTEEYSHTAVNKFNVMPDSIPDWVFDFMPLRGGYFVGNVSPARMDFRWFSLGNCVSILSSLATPDQSMAIMDLLEHRWEELVGEMPLKICYPCIESHEWRIVTGCDPKNTRWSYHNGGSWPVLLWTLTEACIKTGRPQIARRAIDLIESRLHRDCWPEYYDGKQGRYVGKQARKYQTWSIAGYLVAKMMLEDPSHIGMISLEEDKQMKPVIKRSASWTC

SEQ ID NO: 470 - protein, 466 aa, Physcomitrella patens subsp. patens
  misc_feature (1)..(459): Pfam name: Invertase_neut Pfam desc: Plant neutral invertase
  misc_feature: Bit score of 1164.9 for HMM based on sequences of Figure 4
  misc_feature: Functional Homolog Of Ceres Annot ID no. 876994 at SEQ ID NO. 315
MIADAWETLRKSMVFFRSKPVGTIAALDPTEDSLNYNQVFVRDFVPSALAFLMNGEPEIVKNFLLKTLRLQSIEKRIDCFTLGEGVMPASFKVLHDPARKTDTMIADFGESAIGRVAPVDSGFWWIILLRAYTKSTGDHSLADMPDCQRGMRLILTLCLADGFDTFPTLLCADGCCMVDRRMGIYGYPIEIQSLFLMALRSAKSLIKAEGEGKEFLERIDKRLHALSFHMREYFWLDHQQLNNIYRFKTEEYSHTAVNKFNVIPDSIPDWIFDFLPLKGGFFIGNVSPARMDFRWFAIGNFMAILASLATSEQAAAIMDLLEARWPELVGDMPLKVSYPAMEGHEWRVVTGCDPKNTRWSYHNAGSWPVILWMLTAACIKTGRPQIARRAIEQVETRLAKDGWPEYYDGKLGRYVGKQARKFQTWSIAGYLVAKMMLEDPSHLGMIGLEEDKKMKPSLTRSASWTA

SEQ ID NO: 471 - protein, 467 aa, Physcomitrella patens subsp. patens
  misc_feature (1)..(460): Pfam name: Invertase_neut Pfam desc: Plant neutral invertase
  misc_feature: Bit score of 1147.8 for HMM based on sequences of Figure 4
  misc_feature: Functional Homolog Of Ceres Annot ID no. 876994 at SEQ ID NO. 315
MIADAWERLRLSMVYFRDRPVGTIAALDPTEDSLNYNQVFVRDFVPSALAFLMNGEPEIVKNFLLKTLRLQSIEKRIDCFTLGEGVMPASFKVLHDPVRKTDTMIADFGESAIGRVAPVDSGFWWIILLRAYTKSTGDHTLADMADCQRGMRLILTLCLADGFDTFPTLLCADGCCMVDRRMGIYGYPIEIQSLFFMALRCAKVLIKPDGDGKEFLERIDKRLHALSFHMREYFWLDHQQLNNIYRFKTEEYSHTAVNKFNVIPESIPDWIFDFLPLKGGFFIGNVSPARMDFRWFAIGNFMAILGSLATFDQASAIMDLLEARWPELVGDMPLKVTYPAMEGHEWRIITGCDPKNTRWSYHNAGSWPVILWMLTAACIKAGRPQIARRAIEQVETRLSADGWPEYYDGKLGRYVGKQARKFQTWSIAGYLVAKMMLEDPSHLGMIGLEEDRKIQKPSLTRSASWTA

SEQ ID NO: 472 - protein, 484 aa, Arabidopsis thaliana
  misc_feature (21)..(450): Pfam name: Invertase_neut Pfam desc: Plant neutral invertase
  misc_feature: Bit score of 998.4 for HMM based on sequences of Figure 4
  misc_feature: Functional Homolog Of Ceres Annot ID no. 876994 at SEQ ID NO. 315
MGIFDNVNSPGGWETPVSSARNSFEPHPMVAEAWDALRRSLVYFRGQPVGTIAAYDHATEEVLNYDQVFVRDFVPSALAFLMNGEPDIVKNFLLKTIQIQGREKRIDRFKLGEGAMPASFKVIHDPIKETDSINADFGESAIGRVAPVDSGFWWIILLRAYTKSTGDTSLAETSECQKGMRLILSLCLSEGFDTFPTLLCADGCSMIDRRMGVYGYPIEIQALFFMALRSAMSMLKHDAEGKEFMERIVKRLHALSFHMRSYFWLDFQQLNDIYRYKTEEYSHTAVNKFNVIPDSIPEWVFDFMPLRGGYFIGNVSPARMDFRWFALGNCVAILASLATPEQSASIMDLIEERWEELVGEMPVKICHPAIESHEWRIVTGCDPKNTRWSYHNGGSWPGSIVVAINSCMHKDGTATNSKTGHRPGGSTAVEGWLAGVLRREIRKVHRKTGEEVSDMVYRRLLGRQDVVGRSFSSWNDLIGRRQTD

SEQ ID NO: 473 - DNA, 716 bp, Zea mays
  misc_feature: Ceres Clone ID no. 1554933
  misc_feature: Encodes the peptide sequence at SEQ ID NO. 474
actgggctggccgtcgctggctcgctgctacttcggccccttcgccagcgacgataacccaccagttatccgagggaaaattttctatgtgctggttggaatggcgagtacagcatgctttgtaattgtcagtaagaatgatatcccaatctacgaggcagaagttggatctgcacccaaaaaagaggatttgtcttatcaccatcagtttatcctgcatgctgcgttagatgttgttcaggacgtagcatggaccacaaatgcaatgtccctgaagtcagttgatagattcaatgaccttgtggtgtctgtttatgtaactgctggtcataccagattcatgttgcttcatgactcacgcagtgaagatggaataaaaggcttttttcaagaggtccatgagctttacgtcaagatattcctgaacccgctttacctgcccggctctcgcatcacatcctctcattttgataccaaggtcagggccctcgcgaggaagtacctctaatacacgggcatgcatgaagggtttcctaagctttgcatcccgtaagcacaaggctgagctagtttcgcttctttttaggctttctttttgtttgactaggtgagtacccgtgcattgcaacgggaacatataataacataataacttatatacaaaatgtgtcttatattgttataaaaaatatttcatattccttttgaaatcctac

SEQ ID NO: 474 - protein, 169 aa, Zea mays
  misc_feature (9)..(126): Pfam name: Sedlin_N Pfam desc: Sedlin, N-terminal conserved region
  misc_feature: Ceres Clone ID no. 1554933
  misc_feature: in Figure 5
  misc_feature: Bit score of 345.6 for HMM based on sequences of Figure 5
MASTACFVIVSKNDIPIYEAEVGSAPKKEDLSYHHQFILHAALDVVQDVAWTTNAMSLKSVDRFNDLVVSVYVTAGHTRFMLLHDSRSEDGIKGFFQEVHELYVKIFLNPLYLPALASHPLILIPRSGPSRGSTSNTRACMKGFLSFASRKHKAELVSLLFTLSFCLTR

SEQ ID NO: 475 - protein, 136 aa, Zea mays
  misc_feature (9)..(134): Pfam name: Sedlin_N Pfam desc: Sedlin, N-terminal conserved region
  misc_feature: Ceres Peptide ID no. 4355121
  misc_feature: Bit score of 373.2 for HMM based on sequences of Figure 5
  misc_feature: Functional Homolog Of Ceres Clone ID no. 1554933 at SEQ ID NO. 474
MASTACFVIVSKNDIPIYEAEVGSAPKKEDLSYHHQFILHAALDVVQDLAWTTNNAMSLKSVDRFNDLVVSVYVTAGHTRFMLLHDSRSEDGIKSFFQEVHEIYIKIFLNPLYLPGSRITSSHFDTKIRALARKYL

SEQ ID NO: 476 - DNA, 918 bp, Zea mays
  misc_feature: Ceres Clone ID no. 1284476
  misc_feature: Encodes the peptide sequence at SEQ ID NO. 477
gtagtctgtactcacatctttccctcccgtcggccagcagccttccggttcaggccccgtcgcatctctcctcgtcggccagctgcagggcacctagcgcgtggtcggcgagcgcgcgggcgggcggcagggggcgccgcggcggcgagcgcgcaggcccccactcacagacgactgggccggccttcactgctacttcggccccttcgtcgccgacgagaaccaccgcttgttcgggggaattttttctaggtgctggttggaatggcaagtacagcatgctttgtgattgtcagtaagaatgacatcccaatctatgaggcagaagttggatctgcacccaaaaaagaagatttgtcttatcaccatcagtttattctgcatgctgcattagatgttgttcaggatctagcatggacaacaaatgcaatgttcctgaagtcagttgatagattcaatgaccttgtggtgtctgtttatgtaactgctggtcataccagattcatgctgcttcatgactcgcgtagcgaggatggaataaaaagcttttttcaagaggtccatgaactttacatcaagatattcctcaacccgctttacctgcccggctctcgcatcacatcctctcatttcgataccaaggtgagggcgctcgcgaggaggtacctgtaatacgggcatatgctggggtttcatcgtaaagcaggcacgccgatttttttgtgccatcatcatctgataacacatacgtctaatttttcttggcgttggctttgttatgaccgacctatggatcattttttttttcgagaacaaaatgacttgtctaatttttcttggcgttggctttgttatgaccgacctatggatcatttttttttcgagaacaaaatgacttggcgataatgttcaaacttt

SEQ ID NO: 477 - protein, 135 aa, Zea mays
  misc_feature (9)..(133): Pfam name: Sedlin_N Pfam desc: Sedlin, N-terminal conserved region
  misc_feature: Ceres Clone ID no. 1284476
  misc_feature: Bit score of 384.3 for HMM based on sequences of Figure 5
  misc_feature: Functional Homolog Of Ceres Clone ID no. 1554933 at SEQ ID NO. 474
MASTACFVIVSKNDIPIYEAEVGSAPKKEDLSYHHQFILHAALDVVQDLAWTTNAMFLKSVDRFNDLVVSVYVTAGHTRFMLLHDSRSEDGIKSFFQEVHELYIKIFLNPLYLPGSRITSSHFDTKVRALARRYL

SEQ ID NO: 478 - DNA, 636 bp, Zea mays
  misc_feature: Ceres P ID no. 100746476
  misc_feature: Encodes the peptide sequence at SEQ ID NO. 479
agaaactcctcgggggtaaagacttccccttcgctctgctgtcccgtctctttgattcctgaaccccacccaggcattccgcagtggctggccgtcgctggctcgccgctacttcggccctttcgccggtgacgataacccaccagttatccgagggaaaattttctatgtgctgattggaatggcgagtacagcatgctttgtaataattgtcagtaagaatgatatcccaatctacgaggcagaagttggatctgcacccaaaaaagaggatttgtcttatcaccatcagtttatcctgcatgctgcgttagatgttgttcaggacctagcatggaccacaaatgcaatgtccctgaagtcagttgatagattcaatgaccttgtggtgtctgtttatgtaactgctggtcataccagattcatgttgcttcatgactcacgcagtgaagatggaataaaaagcttttttcaagaggtccatgagctttacatcaagatattcctgaacccgctttacctgcccggctctcgcatcacatcatcccattttgataccaaggtcagggccctcgcaaggaagtacctgtaatacacgggcatgcatgaagggtttcctaagctttgcatctcgta

SEQ ID NO: 479 - protein, 136 aa, Zea mays
  misc_feature (10)..(134): Pfam name: Sedlin_N Pfam desc: Sedlin, N-terminal conserved region
  misc_feature: Ceres P ID no. 100746476
  misc_feature: Bit score of 376.2 for HMM based on sequences of Figure 5
  misc_feature: Functional Homolog Of Ceres Clone ID no. 1554933 at SEQ ID NO. 474
MASTACFVIIVSKNDIPIYEAEVGSAPKKEDLSYHHQFILHAALDVVQDLAWTTNAMSLKSVDRFNDLVVSVYVTAGHTRFMLLHDSRSEDGIKSFFQEVHELYIKIFLNPLYLPGSRITSSHFDTKVRALARKYL

SEQ ID NO: 480 - DNA, 1021 bp, Panicum virgatum
  misc_feature: Ceres Clone ID no. 1758903
  misc_feature: Encodes the peptide sequence at SEQ ID NO. 481
gaagagaagagacgagacagcggagctcgggcgctctcagctcagatctactttctgatccccgaccccgagtgcaaagacgacggcagcgctccggcgttttgtggcggtgaggctgcgcccctgcggtcttcaccgacacttgcttccattcttgctggagtgaaattaatctagttgctgttgggaatggcaagtacagcatgctttgtgattgtctgtaagaatgacataccaatctacgaggcagaagttggatctgcaccaaaaaaagaagatctctcttatcaccatcagtttatcctgcatgccgcgttagatgttgttcaggacctagcatggaccacaaatgcaatgttcctgaagtcagttgatagattcaatgaccttgtggtgtctgtttatgtaactgcaggtcataccagatttatgttgcttcatgactcacgcagtgaagatggaataaaaagcttctttcaggaggtccatgaactttacatcaagatattcctcaacccactttacctgcctggctctcgcatcacatcctcccattttgataccaaggtcagggccctcgcaaggaagtacctgtagtacgcaggcatggaggttttataagccaatgtagaagcaggcagcagaggaggcaaaatccattgttcgccatcttctcgtgtcctcgttactcgactctttgggaaatgctgaaatggaatgttattggcttattgcccatcacacaagtccgagcttcctgtgtttttttttcttcttagctttggcttgtgttatgagctatatcgaccgttgttattccgaaccaaatagcttatgaactgtgacttgagaatttgctccattattcggcaattcaaacctgaatggattgtgttgtacatgtcaggtttctaaggccagtcttagtgggagtgtcatcgacacagttatcaagactgaaaatttgagaactgtgtcagtggagtgtcatagtgatgacactcctctcacatttcatgac

SEQ ID NO: 481 - protein, 135 aa, Panicum virgatum
  misc_feature (9)..(133): Pfam name: Sedlin_N Pfam desc: Sedlin, N-terminal conserved region
  misc_feature: Ceres Clone ID no. 1758903
  misc_feature: in Figure 5
  misc_feature: Bit score of 384.5 for HMM based on sequences of Figure 5
  misc_feature: Functional Homolog Of Ceres Clone ID no. 1554933 at SEQ ID NO. 474
MASTACFVIVCKNDIPIYEAEVGSAPKKEDLSYHHQFILHAALDVVQDLAWTTNAMFLKSVDRFNDLVVSVYVTAGHTRFMLLHDSRSEDGIKSFFQEVHELYIKIFLNPLYLPGSRITSSHFDTKVRALARKYL

SEQ ID NO: 482 - DNA, 854 bp, Triticum aestivum
  misc_feature: Ceres Clone ID no. 622426
  misc_feature: Encodes the peptide sequence at SEQ ID NO. 483
tcattactcgttgcgcttagatctcccaccctctgatctctcccgaggcgcgagcaggaagacgctggcgggcggctccggcgaccggagactctgcggccttccctccgccctttccatattgctgtcagagtggaactaatctgttgctggaaatggcaagtacagcatgtttcgtgattgtaagtaagaatgacatcccaatatatgaggcagaagttggatctgcaccaaagaaagaagatctggcttatcaccatcagttcatcctacatgctgcgttagatgtcgttcaggacctagcatggaccacaaatgcaatgttcctgaggtctgttgatagatttaatgaccttgtggtgtctgtttatgtaaccgccggtcatactagattcatgttgcttcacgattcgcgcagcgaggatggaataaaaagctttttccaagaggtccatgaactttacatcaagatattcctcaaccccctgtacctgcccggctctcgcatcgcgtcgtctcatttcgacaccaaggtgagggctctggcgaggaagtatctgtagcgtgctgccacggagcagcttcactgtcgtaacgcggaagcagggctggcaaacgtgctccaccgcagctgttctcctgtcatctatgcaccctgctgaatcaagtatgcacactctatttttcttcgtgttggattgttgcgtgcgccagtgaatcccgagctttcagaatgtttgtaaaatggactgtgctgcgcatggcaaacctgcattacaaaccgtgtaatctccgtgcagcatacggggcatatactagtgttggtttgatttcctgtctttgtcctgcatctg

SEQ ID NO: 483 - protein, 135 aa, Triticum aestivum
  misc_feature (9)..(133): Pfam name: Sedlin_N Pfam desc: Sedlin, N-terminal conserved region
  misc_feature: Ceres Clone ID no. 622426
  misc_feature: in Figure 5
  misc_feature: Bit score of 382.8 for HMM based on sequences of Figure 5
  misc_feature: Functional Homolog Of Ceres Clone ID no. 1554933 at SEQ ID NO. 474
MASTACFVIVSKNDIPIYEAEVGSAPKKEDLAYHHQFILHAALDVVQDLAWTTNAMFLRSVDRFNDLVVSVYVTAGHTRFMLLHDSRSEDGIKSFFQEVHELYIKIFLNPLYLPGSRIASSHFDTKVRALARKYL

SEQ ID NO: 484 - DNA, 976 bp, Panicum virgatum
  misc_feature: Ceres Clone ID no. 1770660
  misc_feature: Encodes the peptide sequence at SEQ ID NO. 485
aaaaatatcgaactcgagctcgcaagacaccaccgaggtcgtgcttgtctgtaggctcggcgggatctcaggctcggatcgatctcggctcaagatgccatcgaactcgagcttgaggtcgtaggctcgctgagatcggctcgttgatagccctcccgctcaggctcatctccccactttcctcctcccttggtgttcctttcccggcggcgaccaccgggccagcggcagcgccattcgttacgtattcgcccggccctttgccggcgaggagcatccaccagagaattcgttgaaatggcaagcacggcatgctttgtgatcgtgagtaagaatgacatcccaatctatgaggctgaagttggatctgctccaaaaaaagaagatttagcttatcagcatcagttcattttgcatgctgcattggatgttgttcaggaccttgcatggactaccaatgcaatgtttctgaggtcggttgatagattcaatgaccttgttgtgtctgtttatgtaactgctggtcatactagatttatgttgcttcatgactcgcggagtgatgatggaataaaaagtttctttcaggaggttcatgacctctacatcaagatattcctcaatccactctacttgcccggttctcggataacatcctcccattttgataccaaggtcagggctcttgcaaggaaatacctgtagcatacacactcctgtggaagatcctgtttggcagcacccttttctttccccccatgcctaatcttgttagtcagtaactgatatatactgaaagtctctgttctgctataccaaaacaatgctgctcaaaccacttttttctctctccccgatacatgtgatgtagaacgttgtacacaacaaatcttaagctgttctcgtcagtcaaggactgatatatcctaagatgcattataccaaaacaatgttgcccccaccagggctttgtttc

SEQ ID NO: 485 - protein, 135 aa, Panicum virgatum
  misc_feature (9)..(133): Pfam name: Sedlin_N Pfam desc: Sedlin, N-terminal conserved region
  misc_feature: Ceres Clone ID no. 1770660
  misc_feature: Bit score of 380.5 for HMM based on sequences of Figure 5
  misc_feature: Functional Homolog Of Ceres Clone ID no. 1554933 at SEQ ID NO. 474
MASTACFVIVSKNDIPIYEAEVGSAPKKEDLAYQHQFILHAALDVVQDLAWTTNAMFLRSVDRFNDLVVSVYVTAGHTRFMLLHDSRSDDGIKSFFQEVHDLYIKIFLNPLYLPGSRITSSHFDTKVRALARKYL

SEQ ID NO: 486 - DNA, 665 bp, Panicum virgatum
  misc_feature: Ceres Clone ID no. 1871189
  misc_feature: Encodes the peptide sequence at SEQ ID NO. 487
atctctgtttcttccccactttcctcctcccttggtgttcctttgctggcggcgaccactgggccagctgcagcgccattcgtcgcgtattcgcccgcccggccctttgccggcgaggagcatccaccagagaattagttgaaatggcaagcacggtatgctttgtgattgttagtaagaatgacatcccaatctatgaggctgaagttggatctgctccaaaaaaagaagatttagcttatcagcatcagttcattttgcatgctgcattggatgttgttcaggaccttgcatggactaccaatgcaatgtttctgaggtcggttgatagattcaatgaccttgttgtgtctgtttatgtaactgctggtcatactagatttatgttgcttcatgactcacggagtgatgatggaataaaaagtttctttcaggaggttcatgacctttacatcaagatattcctcaatccactctacttgcccggttctcggataacgtcctcccattttgataccaaggtcagggctcttgcaaggaaatacctgtagcatacacactccagtggaagatcctgtttggcagcacctttttcttatttcccccatgcctaatcttgttagtaaatgactgaaatattctgaaattcactgttctcctatacc

SEQ ID NO: 487 - protein, 135 aa, Panicum virgatum
  misc_feature (9)..(133): Pfam name: Sedlin_N Pfam desc: Sedlin, N-terminal conserved region
  misc_feature: Ceres Clone ID no. 1871189
  misc_feature: Bit score of 377.0 for HMM based on sequences of Figure 5
  misc_feature: Functional Homolog Of Ceres Clone ID no. 1554933 at SEQ ID NO. 474
MASTVCFVIVSKNDIPIYEAEVGSAPKKEDLAYQHQFILHAALDVVQDLAWTTNAMFLRSVDRFNDLVVSVYVTAGHTRFMLLHDSRSDDGIKSFFQEVHDLYIKIFLNPLYLPGSRITSSHFDTKVRALARKYL

SEQ ID NO: 488 - protein, 135 aa, Oryza sativa subsp. japonica
  misc_feature (9)..(133): Pfam name: Sedlin_N Pfam desc: Sedlin, N-terminal conserved region
  misc_feature: Public GI ID no. 32490260
  misc_feature: in Figure 5
  misc_feature: Bit score of 378.5 for HMM based on sequences of Figure 5
  misc_feature: Functional Homolog Of Ceres Clone ID no. 1554933 at SEQ ID NO. 474
MASTACFAIVSKNDIPIYEAEVGSAPKKEDLAYQHQFILHAALDVVQDLAWSTNAMFLKSVDRFNDLVVSVYVTAGHARFMLLHDSRSEDGIKSFFQEVHELYIKIFLNPLYLPGSRITSSHFDTKVRALARRYL

SEQ ID NO: 489 - protein, 135 aa, Cynodon dactylon
  misc_feature (9)..(133): Pfam name: Sedlin_N Pfam desc: Sedlin, N-terminal conserved region
  misc_feature: Public GI ID no. 49659792
  misc_feature: Bit score of 376.6 for HMM based on sequences of Figure 5
  misc_feature: Functional Homolog Of Ceres Clone ID no. 1554933 at SEQ ID NO. 474
MASTACFVIVSKNDIPIYGAEVGSAPKKEELAYQHQFILHAALDVVQDLAWTTNAMFLKSVDRFNDLVVSVYVTAGHTRFMLLHDSRSEDGIKTFFQEVHELYIKIFLNPLYLPGSRITSSHFDTKVRALARRYL

SEQ ID NO: 490 - protein, 135 aa, Oryza sativa subsp. japonica
  misc_feature (9)..(133): Pfam name: Sedlin_N Pfam desc: Sedlin, N-terminal conserved region
  misc_feature: Public GI ID no. 115447281
  misc_feature: Bit score of 375.3 for HMM based on sequences of Figure 5
  misc_feature: Functional Homolog Of Ceres Clone ID no. 1554933 at SEQ ID NO. 474
MASTACFVIVSKNDIPIYEAEVGSAPKREDQAYQHQFILHAALDVVQDLAWATNTMFLKSVDRFDDLVVSVYVTAGHTRFMLLHDSRSEDGIKSFFQEVHELYIKIFLNPLYLPGSRITSSHFDTKVRALARKYL

SEQ ID NO: 491 - DNA, 950 bp, Gossypium hirsutum
  misc_feature: Ceres Clone ID no. 1835064
  misc_feature: Encodes the peptide sequence at SEQ ID NO. 492
aaaaaacgatgaaaataaaacaatgtcatccccaacccttgagtaaatactgtacccaatcacaaaggttaaagtgggaaaactgctacaagctccagtggagtattcaagtaacggtgcggtgaaaagtttgtattgtactgcacaaattcaatatcatctactcggaacagtgttcccaatttttctatatattatttctgggaacccattttttatttttttccccagttcctgattttgagagttgatcctgccgtaacacaaggatgacaagtacagcttgttttatcattgtgagccgaaatgacatcccaatatatgaagctgaagtgggatctgccgctaaaagagaagatgctgctcagctgcatcaattcgtattacatgcagctctggatattgttcaagaccttgcatggaccaccagtgcaatgttcttgaaagcaattgacaggttcaatgatttggtggtatcggtatatgtaacagctggtcatacacgattcatgctacttcatgactctcgtaatgaagatggaataaagagctttttccaggaggttcatgagctatatataaagatccttctaaatccactctacctgcctggttcccgcattacatcgtcgcatttcgacaccaaagttcgtgcccttgcaagaaaatatctatagactctccatagttgaagatttcatatgtctgtttcatgttctctcatgtatgctgaagagttaacccttttttatgatatcggtttgtgtgttctttacattattagtggctctgtcggaatttcatgggtccagttgcctgtaggaacgacagagacaaagaacatctgagattatgttttctttattggatgtttttaaatagaatttgggaaggaagagttttattgtttagatctgatttataaataagggatgtctaatgtggttatc

SEQ ID NO: 492 - protein, 135 aa, Gossypium hirsutum
  misc_feature (9)..(133): Pfam name: Sedlin_N Pfam desc: Sedlin, N-terminal conserved region
  misc_feature: Ceres Clone ID no. 1835064
  misc_feature: in Figure 5
  misc_feature: Bit score of 379.6 for HMM based on sequences of Figure 5
  misc_feature: Functional Homolog Of Ceres Clone ID no. 1554933 at SEQ ID NO. 474
MTSTACFIIVSRNDIPIYEAEVGSAAKREDAAQLHQFVLHAALDIVQDLAWTTSAMFLKAIDRFNDLVVSVYVTAGHTRFMLLHDSRNEDGIKSFFQEVHELYIKILLNPLYLPGSRITSSHFDTKVRALARKYL

SEQ ID NO: 493 - DNA, 877 bp, Arabidopsis thaliana
  misc_feature: Ceres Clone ID no. 18152
  misc_feature: Encodes the peptide sequence at SEQ ID NO. 494
acccgtatctaaaaagttctcgtggtgtatagtcctaaactagtagacgacagaatcaaacctgtttgaagtatttagcacggatccaaacacgagagacatcccaaggaatctgattctccaatgtttgtctagacataagatgcgttgatggtaaagaagaaacgatacgcacatcagattcacagggttttacttctttttttggagacacaagatctaggatttcctttatttagagacgagggattctatggctaacactgcctgctttatcattgtgggccggaatgatattcccatctatgaagctgaagttggatctgctgctaaaagagaagatgctgcacagttgcaccaatttatattacatgcagcgttagatgttgtccaagacctagcatggactacaagtgccatgttcttgaagtcagtggacaggtttaacgatctggttgtgtcagtatatgttaccgcaggccatacccgactgatgctccttcatgattcacggaatgaggacggcatcaagagcttctttcaagaggtgcatgagctttatataaagattcttctgaatcccttgtatcttcctggttctcggataacgtcgtcacattttgacaccaaagtacgtgcacttgcaagaaagtacctgtagagaagacggagattctgtttgcatttggtgatcaaatttttcttgtacccatatcgcatagttcccaagtcaattgtttctgttttctttttgagtgcctggatttctgttatttctaacttgcaagcaacattttaataagaatgggattccttgtttagtatgagtaatgaatgatccattcaatccaaaataatttcatctttggttgttatc

SEQ ID NO: 494 - protein, 135 aa, Arabidopsis thaliana
  misc_feature (9)..(133): Pfam name: Sedlin_N Pfam desc: Sedlin, N-terminal conserved region
  misc_feature: Ceres Clone ID no. 18152
  misc_feature: in Figure 5
  misc_feature: Bit score of 379.5 for HMM based on sequences of Figure 5
  misc_feature: Functional Homolog Of Ceres Clone ID no. 1554933 at SEQ ID NO. 474
MANTACFIIVGRNDIPIYEAEVGSAAKREDAAQLHQFILHAALDVVQDLAWTTSAMFLKSVDRFNDLVVSVYVTAGHTRLMLLHDSRNEDGIKSFFQEVHELYIKILLNPLYLPGSRITSSHFDTKVRALARKYL

SEQ ID NO: 495 - DNA, 627 bp, Zea mays
  misc_feature: Ceres Clone ID no. 1418421
  misc_feature: Encodes the peptide sequence at SEQ ID NO. 496
aaaaatcgaaaaaagggttcaatcttcctctggtctcgatctgaatctctctctctctctctctggcaggaaacataaaaaaaaaaaagacggaatctagttagggattttgtaatggcgaacactgcttgctttatgattgtggctcggaatgatattcccatctatgaagctgaagttggatctgctgctaaaagagaagatgcggctcaactgcaccagtttatattacatgccgcgttggatgtcgtccaagacttagcatggactacaagtgccatgttcttgaagtctgtcgacagattcaacgatctggttgtctcagtctatgttactgcaggtcatactcgtctcatgctccttcatgattcacgtaatgaggatggcatcaagagcttcttccaggaggtgcatgagctttatataaagattcttctgaatcccttgtatctgcctggttctcgcatcacatcgacgcattttgacaccaaggtacgtgcactagcaagaaagtacctctagagaagaccgagattctgtcttccagctcaatttccttggtcccatatcgcaattgtttcgtctttgattgttatccagcctctactttctttgtatatcgaaaat

SEQ ID NO: 496 - protein, 135 aa, Zea mays
  misc_feature (9)..(133): Pfam name: Sedlin_N Pfam desc: Sedlin, N-terminal conserved region
  misc_feature: Ceres Clone ID no. 1418421
  misc_feature: Bit score of 375.0 for HMM based on sequences of Figure 5
  misc_feature: Functional Homolog Of Ceres Clone ID no. 1554933 at SEQ ID NO. 474
MANTACFMIVARNDIPIYEAEVGSAAKREDAAQLHQFILHAALDVVQDLAWTTSAMFLKSVDRFNDLVVSVYVTAGHTRLMLLHDSRNEDGIKSFFQEVHELYIKILLNPLYLPGSRITSTHFDTKVRALARKYL

SEQ ID NO: 497 - DNA, 637 bp, Triticum aestivum
  misc_feature: Ceres Clone ID no. 1416780
  misc_feature: Encodes the peptide sequence at SEQ ID NO. 498
attactcgttgcgcttagatctcccaccctctgatctcccccgaggcgcgagcaggaagacgccggcgggcggctccggcgaccggagaatctgcggccttcctccccgccctttccataagattgctgccagagtgaaactagtctgttggtggaaatggccagtacagcatgcttcgtgattgtaagtaagaacgacatcccaatctatgaggcagaagttggatctgcacccaaaaaagaagatctggcttatcaccatcagttcatcctgcatgctgcgttagatgtggttcaggacctagcatggaccacaaatgcaatgttcctgaggtcggttgatagatttaatgaccttgtggtgtctgtttatgtaaccgccggtcatactagattcatgttgcttcacgattcacgcagcgaggatggaataaaaagcttttttcaagaggtccatgaactttacatctagatattccctcaccccctgtacctgcccggatctcgcatcgcatcgtcacatttcgacaccaaggtgagggctctcgcgaggaagtatctgtagcgtttgggcacggagcagcttcactgtcataacgcggcagcagggccagcaaacatcatactccaccgcagt

SEQ ID NO: 498 - protein, 104 aa, Triticum aestivum
  misc_feature (9)..(104): Pfam name: Sedlin_N Pfam desc: Sedlin, N-terminal conserved region
  misc_feature: Ceres Clone ID no. 1416780
  misc_feature: Bit score of 243.2 for HMM based on sequences of Figure 5
  misc_feature: Functional Homolog Of Ceres Clone ID no. 1554933 at SEQ ID NO. 474
  misc_feature (92)..(92): Xaa is any aa, unknown, or other
  misc_feature (93)..(93): Xaa is any aa, unknown, or other
MASTACFVIVSKNDIPIYEAEVGSAPKKEDLAYHHQFILHAALDVVQDLAWTTNAMFLRSVDRFNDLVVSVYVTAGHTRFMLLHDSRSEDGXXSFFQEVHELYI

SEQ ID NO: 499 - DNA, 884 bp, Gossypium hirsutum
  misc_feature: Ceres Clone ID no. 1894775
  misc_feature: Encodes the peptide sequence at SEQ ID NO. 500
aaatagtgtaccaaatcacaaaggttaaagtgggaaaactgctacaagctccagtggagtattcaagtaactgtgcggtgaaaagtttgttttgtactgcacaaattcaatatcatccactcaaacagtgctcccaattattctatatattatttctgggatcccattttttattttttccccaattcctgattttgagagttgatcctgccgtaacacaaggatgacaagtacagcttgttttatcattgtgagccgaaatgacatcccaatatatgaagctgaagtgggatctgctgctaaaagagaagatgctgctcagctgcatcaattcgtattacatgcagctctggatattgttcaagaccttgcatggaccaccagtgcaatgttcttgaaagcaattgacagattcaatgatttggtggtatcggtatatgtaacagctagtcatacacgattcatgctacttcatgactctcgtaatgaagatggaataaagagctttttccaggaggttcatgagctatatataaagatccttctaaatccactctacctgcctggttcccgcattacatcgtcgcatttcgacaccaaagttcgtgcccttgcaagaaaatatctctagactctccatagttgaagatttcatatgtatgctggagagttgacccttttttatggtatcggtttgtgtgtttctttacattattagtggctctgtcggaatttcatggatccagttgtctgtgggaacgacagagacagagaacatctgagattatgttttctttattggatgtttttaaatagaatttgggaagggagagttttattgtttagatctgatttataaataattgatgtctaatgtggttatc

SEQ ID NO: 500 - protein, 135 aa, Gossypium hirsutum
  misc_feature (9)..(133): Pfam name: Sedlin_N Pfam desc: Sedlin, N-terminal conserved region
  misc_feature: Ceres Clone ID no. 1894775
  misc_feature: Bit score of 375.2 for HMM based on sequences of Figure 5
  misc_feature: Functional Homolog Of Ceres Clone ID no. 1554933 at SEQ ID NO. 474
MTSTACFIIVSRNDIPIYEAEVGSAAKREDAAQLHQFVLHAALDIVQDLAWTTSAMFLKAIDRFNDLVVSVYVTASHTRFMLLHDSRNEDGIKSFFQEVHELYIKILLNPLYLPGSRITSSHFDTKVRALARKYL

SEQ ID NO: 501 - DNA, 661 bp, Brassica napus
  misc_feature: Ceres Clone ID no. 980427
  misc_feature: Encodes the peptide sequence at SEQ ID NO. 502
aagggttcaatcttcctctggtctcgatctgaatctctctctctctctctctggcaggaaacataaaaaaaaaaaaagacggaatctagttagggattttgtaatggcgaacactgcttgctttatgattgtggctcggaatgatattcccatctatgaagctgaagttggatctgctgctaaaagagaagatgtggctcaactgcaccagtttatattacatgccgcgttggatgtcgtccaagacttagcatggactacaagtgccatgttcttgaagtctgtcgacagattcaacgatctggttgtctcagtctatgttactgcaggtcatactcgtctcatgctccttcatgattcacgtaatgaggatggcatcaagagcttcttccaggaggkgcatgagctttatataaagattcttctgaatcccttgtatctgcctggttctcgcatcacatcgacgcattttgacaccaaggtacgtgcactagcaagaaagtacctytagagaagaccgagattytgtyttccagctcaatttccttggtcccatatcgcaattgtttcgtctttgattgttatccagcctctactttytttgtaatatcgaaaatatttgctagtaaacatagaatgaaaaaggaagagttttytttgc

SEQ ID NO: 502 - protein, 135 aa, Brassica napus
  misc_feature (9)..(133): Pfam name: Sedlin_N Pfam desc: Sedlin, N-terminal conserved region
  misc_feature: Ceres Clone ID no. 980427
  misc_feature: Bit score of 366.5 for HMM based on sequences of Figure 5
  misc_feature: Functional Homolog Of Ceres Clone ID no. 1554933 at SEQ ID NO. 474
  misc_feature (99)..(99): Xaa is any aa, unknown, or other
  misc_feature (135)..(135): Xaa is any aa, unknown, or other
MANTACFMIVARNDIPIYEAEVGSAAKREDVAQLHQFILHAALDVVQDLAWTTSAMFLKSVDRFNDLVVSVYVTAGHTRLMLLHDSRNEDGIKSFFQEXHELYIKILLNPLYLPGSRITSTHFDTKVRALARKYX

SEQ ID NO: 503 - protein, 220 aa, Oryza sativa subsp. japonica
  misc_feature (9)..(143): Pfam name: Sedlin_N Pfam desc: Sedlin, N-terminal conserved region
  misc_feature: Public GI ID no. 70663924
  misc_feature: Bit score of 336.3 for HMM based on sequences of Figure 5
  misc_feature: Functional Homolog Of Ceres Clone ID no. 1554933 at SEQ ID NO. 474
MASTACFAIVSKNDIPIYEAEVGSAPKKEDLAYQHQFILHAALDVVQDLAWSTNAMFLKSVDRFNDLVVSVYFYLYNNIVFFNLMTHARFMLLHDSRSEDGIKSFFQEVHELYIKIFLNPLYLPGSRITSSHFDTKVRALARSSLPVNSNLININSDRCVCGVMVRTANISRQLIGGRRRSRERFWEHTSSDEPIAACQVNQEMRCYTTKHTLARLITVT

SEQ ID NO: 504 - protein, 145 aa, Oryza sativa subsp. indica
  misc_feature (9)..(143): Pfam name: Sedlin_N Pfam desc: Sedlin, N-terminal conserved region
  misc_feature: Public GI ID no. 125548935
  misc_feature: Bit score of 343.4 for HMM based on sequences of Figure 5
  misc_feature: Functional Homolog Of Ceres Clone ID no. 1554933 at SEQ ID NO. 474
MASTACFAIVSKNDIPIYEAEVGSAPKKEDLAYQHQFILHAALDVVQDLAWSTNAMFLKSVDRFNDLVVSVYFYLYNNIVFFNLMTHARFMLLHDSRSEDGIKSFFQEVHELYIKIFLNPLYLPGSRITSSHFDTKVRALARRYL

SEQ ID NO: 505 - DNA, 770 bp, Musa acuminata
  misc_feature: Ceres Clone ID no. 1730282
  misc_feature: Encodes the peptide sequence at SEQ ID NO. 506
agagagagagagagagcaggggatcagtcaccgcggcagagggagtgcgattcgccaagtgcagctcatctccgatcgctcgaggccggtggccgagacggttagatcggcgtcggatcgaatagaccagctacttcttttaatatttccctttcctctttcgtcgtgtccgcggcaggcgagagtgcgattcgcaagtgcagctcgactccgacttcacgaggccgtaacccgaggtctgggaataatatttgatggctaatacagcgtgcttcattattgtcagcagaaatgacattccaatttatgaagctgaagttggctctgcaatgaaaaaagaagaagctgctcagcagcaccagttcattttacatgctgccttggatattgtcgaagaccttgcatggacaacaagtgctatgttcttgaaggcagtggacaagttcaatgatcttgtggtctctgtatatgttactgctggtcacactagatttatgttgctacatgattcccgcaatgaggatgggataaagagtttcttccaagaggttcaggagctttacataaagattttattaaatcccctatacttacctgggtcgcgcatcacatcatcacattttgataccaaagtccgagctcttgcaagaaaatatctgtgaacatgctggaccgcatatcaagggaagtttctcttctcaaatctgatccttgtgttcatttgaagcagtgccattgggtttctttctctcttgccgcctctgtttttt

SEQ ID NO: 506 - protein, 135 aa, Musa acuminata
  misc_feature (9)..(133): Pfam name: Sedlin_N Pfam desc: Sedlin, N-terminal conserved region
  misc_feature: Ceres Clone ID no. 1730282
  misc_feature: in Figure 5
  misc_feature: Bit score of 377.3 for HMM based on sequences of Figure 5
  misc_feature: Functional Homolog Of Ceres Clone ID no. 1554933 at SEQ ID NO. 474
MANTACFIIVSRNDIPIYEAEVGSAMKKEEAAQQHQFILHAALDIVEDLAWTTSAMFLKAVDKFNDLVVSVYVTAGHTRFMLLHDSRNEDGIKSFFQEVQELYIKILLNPLYLPGSRITSSHFDTKVRALARKYL

SEQ ID NO: 507 - DNA, 785 bp, Glycine max
  misc_feature: Ceres Clone ID no. 528086
  misc_feature: Encodes the peptide sequence at SEQ ID NO. 508
gaacaaaaacccaaaaaacatgcatttgttcctgaatttgttgacgaatcctaattcctaactaattctactcaacagtacattcaatccaccgctttgttcaactcaaatcctcaatcgctcgcgatttcttcttctggaattctcaaggatctcgataaatggcaaccactgcctgtttcatcattgttagcagaaatgacattcctatatatgaagctgaagttggtgtagctgctaaaagggaggattctgctcagctgcatcaatttatccttcatgctgctctcgatattgttcaggaccttgcatggactactagcgctatgtacttgaaatcagtagacaggtttaatgaacttgtggtgtcagtgtatgttacagctggtcatacccgatttatgttgctacatgactcccgtaatgatgatggtatcaagagcttcttccaagaggtgcatgagctttacataaagactctccttaatcccctgtacttacctggctcccggatcacgtcatcacattttgatactaaagtccgagcccttgcacgaaagtatttgtagaaaccactaatttgtctgtggttgatagttcatatagcactgtggcccgactcttaaccttgttcgttcttgattacatttgaaaagctgtatttctttttctttatttccatgatttggcggcaagagtagatttgctgctgtctataatgtacctcagtcattagcaggtggtgcctgtttttgctaatgaaggcgattgttgacgagctattt

SEQ ID NO: 508 - protein, 135 aa, Glycine max
  misc_feature (9)..(133): Pfam name: Sedlin_N Pfam desc: Sedlin, N-terminal conserved region
  misc_feature: Ceres Clone ID no. 528086
  misc_feature: in Figure 5
  misc_feature: Bit score of 374.7 for HMM based on sequences of Figure 5
  misc_feature: Functional Homolog Of Ceres Clone ID no. 1554933 at SEQ ID NO. 474
MATTACFIIVSRNDIPIYEAEVGVAAKREDSAQLHQFILHAALDIVQDLAWTTSAMYLKSVDRFNELVVSVYVTAGHTRFMLLHDSRNDDGIKSFFQEVHELYIKTLLNPLYLPGSRITSSHFDTKVRALARKYL

SEQ ID NO: 509 - DNA, 420 bp, Sorghum bicolor
  misc_feature: Ceres Annot ID no. 8657405
  misc_feature: Encodes the peptide sequence at SEQ ID NO. 510
atgggtgtgaaaggcactttaggtgtgcaggtgctggttggaatggcaagtacagcatgctttgtgattgtcagtaagaatgacatcccgatctatgaggcagaagttggatctgcacccaaaaaagaagatttgtcttatcaccatcagtttatcctgcatgctgcgttagatgttgttcaggacctagcatggaccacaaatgcaatgttcctgaagtcagttgatagattcaatgaccttgtggtattcatgttgcttcatgactcacgtagtgaagatggaataaaaagcttttttcaagaggtccatgaactttacatcaagatattcctcaacccgctttacctgcccggttctcgcatcacatcctctcatttcgataccaaggtcagggccctcgcaaggaagtacctgtaa

SEQ ID NO: 510 - protein, 139 aa, Sorghum bicolor
  misc_feature (23)..(137): Pfam name: Sedlin_N Pfam desc: Sedlin, N-terminal conserved region
  misc_feature: Ceres Annot ID no. 8657405
  misc_feature: Bit score of 335.3 for HMM based on sequences of Figure 5
  misc_feature: Functional Homolog Of Ceres Clone ID no. 1554933 at SEQ ID NO. 474
MGVKGTLGVQVLVGMASTACFVIVSKNDIPIYEAEVGSAPKKEDLSYHHQFILHAALDVVQDLAWTTNAMFLKSVDRFNDLVVFMLLHDSRSEDGIKSFFQEVHELYIKIFLNPLYLPGSRITSSHFDTKVRALARKYL

SEQ ID NO: 511 - protein, 117 aa, Oryza sativa subsp. japonica
  misc_feature (1)..(115): Pfam name: Sedlin_N Pfam desc: Sedlin, N-terminal conserved region
  misc_feature: Public GI ID no. 115459286
  misc_feature: Bit score of 267.8 for HMM based on sequences of Figure 5
  misc_feature: Functional Homolog Of Ceres Clone ID no. 1554933 at SEQ ID NO. 474
SSDIHLLWQKEDLAYQHQFILHAALDVVQDLAWSTNAMFLKSVDRFNDLVVSVYVTAGHARFMLLHDSRSEDGIKSFFQEVHELYIKIFLNPLYLPGSRITSSHFDTKVRALARRYL

SEQ ID NO: 512 - DNA, 381 bp, Sorghum bicolor
  misc_feature: Ceres Annot ID no. 7923831
  misc_feature: Encodes the peptide sequence at SEQ ID NO. 513
atgggtgtgaaaggcactttaggtgtgcaggtgctggttggaatggcaagtacagcatgctttgtgattgtcagtaagaatgacatcccgatctatgaggcagaagttggatctgcacccaaaaaagaagatttgtcttatcaccatcagtttatcctgcatgctgcgttagatgttgttcaggacctagcatggaccacaaatgcaatattcatgttgcttcatgactcacgtagtgaagatggaataaaaagcttttttcaagaggtccatgaactttacatcaagatattcctcaacccgctttacctgcccggttctcgcatcacatcctctcatttcgataccaaggtcagggccctcgcaaggaagtacctgtaa

SEQ ID NO: 513 - protein, 126 aa, Sorghum bicolor
  misc_feature (23)..(124): Pfam name: Sedlin_N Pfam desc: Sedlin, N-terminal conserved region
  misc_feature: Ceres Annot ID no. 7923831
  misc_feature: Bit score of 278.2 for HMM based on sequences of Figure 5
  misc_feature: Functional Homolog Of Ceres Clone ID no. 1554933 at SEQ ID NO. 474
MGVKGTLGVQVLVGMASTACFVIVSKNDIPIYEAEVGSAPKKEDLSYHHQFILHAALDVVQDLAWTTNAIFMLLHDSRSEDGIKSFFQEVHELYIKIFLNPLYLPGSRITSSHFDTKVRALARKYL

SEQ ID NO: 514 - DNA, 667 bp, Zea mays
  misc_feature: Ceres Clone ID no. 1287015
  misc_feature: Encodes the peptide sequence at SEQ ID NO. 515
ctctttgattcctgaaccccacccaggcattccgcagtggctggccgtcgctggctcgccgctacttcggccctttcgccggtgacgataacccaccagttatccgagggaaaattttctatgtgctgattggaatggcgagtacagcatgctttgtaataattgtcagtaagaatgatatcccaatctacgaggcagaagttggatctgcacccaaaaaagaggatttgtcttatcaccatcagtttatcctgcatgctgcgttagatgttgttcaggacctagcatggaccacaaatgcaatattcatgttgcttcatgactcacgcagtgaagatggaataaaaagcttttttcaagaggtccatgagctttacatcaagatattcctgaacccgctttacctgcccggctctcgcatcacatcatcccattttgataccaaggtcagggccctcgcaaggaagtacctgtaatacacgggcatgcatgaagggtttcctaagctttgcatctcgtaagcacaaggctgagctagtttcgcttcgatctttttaggctttctttttgtttgatatattccgcgcataaaatgcccctttgctccagattatccttgcataaatgcctgtccctgttatgcataataaacaaagcgtgttccgcc

SEQ ID NO: 515 - protein, 113 aa, Zea mays
  misc_feature (10)..(111): Pfam name: Sedlin_N Pfam desc: Sedlin, N-terminal conserved region
  misc_feature: Ceres Clone ID no. 1287015
  misc_feature: Bit score of 271.1 for HMM based on sequences of Figure 5
  misc_feature: Functional Homolog Of Ceres Clone ID no. 1554933 at SEQ ID NO. 474
MASTACFVIIVSKNDIPIYEAEVGSAPKKEDLSYHHQFILHAALDVVQDLAWTTNAIFMLLHDSRSEDGIKSFFQEVHELYIKIFLNPLYLPGSRITSSHFDTKVRALARKYL

SEQ ID NO: 516 - DNA, 360 bp, Populus balsamifera subsp. trichocarpa
  misc_feature: Ceres Annot ID no. 1448104
  misc_feature: Encodes the peptide sequence at SEQ ID NO. 517
atggcaaccacagcttgttttataattgtgagcaggaatgatatccctatatatgaagctgaagttggatctgctactaaaagggaagacgctgcacagatgcatcaatttatattgcatgcagctttggatattgttcaggatcttgcatggaccaccagcgccatgtatttgaaggcaattgacagatttatgctacttcatgactctcgcaatgatgatggaatcaagagctttttccaggaggttcatgagctgtatataaagattcttctcaaccccctatacttgcctggttcccgcattacatcttcgcattttgacaccaaagttcgggctcttgcaagaaaatacctatag

SEQ ID NO: 517 - protein, 119 aa, Populus balsamifera subsp. trichocarpa
  misc_feature (9)..(117): Pfam name: Sedlin_N Pfam desc: Sedlin, N-terminal conserved region
  misc_feature: Ceres Annot ID no. 1448104
  misc_feature: in Figure 5
  misc_feature: Bit score of 308.4 for HMM based on sequences of Figure 5
  misc_feature: Functional Homolog Of Ceres Clone ID no. 1554933 at SEQ ID NO. 474
MATTACFIIVSRNDIPIYEAEVGSATKREDAAQMHQFILHAALDIVQDLAWTTSAMYLKAIDRFMLLHDSRNDDGIKSFFQEVHELYIKILLNPLYLPGSRITSSHFDTKVRALARKYL

SEQ ID NO: 518 - protein, 189 aa, Zea mays
  misc_feature (63)..(187): Pfam name: Sedlin_N Pfam desc: Sedlin, N-terminal conserved region
  misc_feature: Bit score of 367.6 for HMM based on sequences of Figure 5
  misc_feature: Functional Homolog Of Ceres Clone ID no. 1554933 at SEQ ID NO. 474
MSLKSVDRFNDLVVSDYDSAGHIWPSLARCHFGPFASDDNPPVIRGKIFYVLIGMASTACFVIVSKNDIPIYEAEVGSAPKKEDSSYHHQFILHAALDVVQDLAWTTNAMSLKSVDRFNDLVVSVYVTAVLTRFMLLHDSRSEDGIKSFFQEVHEIYIKIFLNPLYLPGSRITSSHFDTKIRALARKYL

SEQ ID NO: 519 - protein, 135 aa, Triticum aestivum
  misc_feature (9)..(133): Pfam name: Sedlin_N Pfam desc: Sedlin, N-terminal conserved region
  misc_feature: Bit score of 376.4 for HMM based on sequences of Figure 5
  misc_feature: Functional Homolog Of Ceres Clone ID no. 1554933 at SEQ ID NO. 474
MASTACFVIVSKNDIPIYEAEVGSAPKKEDLAYHHQFILHAALDVVQDLAWTTNAMFLRSVDRFNDLVVSVYVTAGHTRFMLLHDSRSEDGIKSFFQEVHELYIKIFLNPLYLPGSRIASSHFDTKVRAPPRKYL

SEQ ID NO: 520 - DNA, 1770 bp, Zea mays
  misc_feature: Ceres Clone ID no. 258841
  misc_feature: Encodes the peptide sequence at SEQ ID NO. 521
ctcgcgtcgcacggatctctccttccctccaggctccagctccaaagcctcgtcgccttcttcgccccgccacccgtcctgcacactcacaactagacatcgtaccacccaggtgatctcgcgcgccactccctccttccatcccttagccccagctttactcttccctcccgcgcccagatcccgaggctcctacccctcgatcgccgccttccagcggccgatccggcgctggctcgcggcccccgacaggttttgctttatgctggttcatttgtctacggacaatggactagttgctgcactgtttctgtgattcaccatgggaagcagtggagcagatacaccgtctaaggagcagcagccacctgctacctcaggtgctgcaataccacctgtttatccagattggtctagcttccaggcatatcccccaatcccaccacatggattcttcccctcacctgtggcatcaagtccacagggtcatcctttcatgtggggagctcaagctatgattccaccttatggaacaccgccaccatatgtcatgtacccccctggagtatatgcccacccatctatgcccccgggtgcacatccatttactccttatgccattacttctccaaatggcaatgctgatgctactggaactactgctgcagctggtaatactgatggcaagccctctgaaggcaaagataaaagtccaacaaagcgatccaaaggaagtttgggcagcttgaacatgcttactggaaagaatcccagtgaacatggtaagtcctcaggtgcatcgggtaatggagtcacttctcaaagtggcgaaagtggcagtgacagttcaagcgaagggagtgaaggaaattctcacaatgattcacatcacaaggaaagtggacaggaacacgatggggatgttcgaagttcccggaatggtgtatcacgtttgcaatctgagggaaaattgaaccaagctatggcaatcttgcccataccatcaagtggcccagcaactgatccaactacaaacctaaatattgggatggactattgggccaacacagcaagctctgctcctgcaattcatggcaaagcgacgtcaacaacagttccaggggctgtggtcccagcagagcagtggacacaggatgaacatgaactcaaaaagcaaagaagaaagcagtccaatagggagtctgcacgtagatctaggttacgtaaacaggctgaatgtgaggaattggctcaacgtgctgatgttttaaagcaggaaaatgcttcacttagagatgaagtaaaccgtatcagaaaagagtacgaggaacttctatcaaggaataactcactaaaggaaaaacttgaaggcaaacaacacaaaactgatgaggctggacttaacaacaagctgcaacattctgctgatgacagccagaaaaaaggaaactaatgctatcatgcaatgcttgcctacattggtcctaactagattattgggaggtgcaattgtagtatgcacattaactccttactttattgcagttaattgttaccaggttgtgataatgttgatgccaaccttttgtgtgggtgtttcctgtttcagatctatcttggcttatcttttagaagccaagatgtgactgaagctataggctgtgacccaattcactatatctttagaaatagtggataaagtcaaacttacaaatttgaagtgctgactaatattgttatgtatacctggcaaaagactggttttctttc

SEQ ID NO: 521 - protein, 376 aa, Zea mays
  misc_feature (1)..(188): Pfam name: MFMR Pfam desc: G-box binding protein MFMR
  misc_feature (279)..(342): Pfam name: bZIP_1 Pfam desc: bZIP transcription factor
  misc_feature (279)..(333): Pfam name: bZIP_2 Pfam desc: Basic region leucine zipper
  misc_feature: Ceres Clone ID no. 258841
  misc_feature: in Figure 6
  misc_feature: Bit score of 856.4 for HMM based on sequences of Figure 6
MGSSGADTPSKEQQPPATSGAAIPPVYPDWSSFQAYPPIPPHGFFPSPVASSPQGHPFMWGAQAMIPPYGTPPPYVMYPPGVYAHPSMPPGAHPFTPYAITSPNGNADATGTTAAAGNTDGKPSEGKDKSPTKRSKGSLGSLNMLTGKNPSEHGKSSGASGNGVTSQSGESGSDSSSEGSEGNSHNDSHHKESGQEHDGDVRSSRNGVSRLQSEGKLNQAMAILPIPSSGPATDPTTNLNIGMDYWANTASSAPAIHGKATSTTVPGAVVPAEQWTQDEHELKKQRRKQSNRESARRSRLRKQAECEELAQRADVLKQENASLRDEVNRIRKEYEELLSRNNSLKEKLEGKQHKTDEAGLNNKLQHSADDSQKKGN

SEQ ID NO: 522 - DNA, 1164 bp, Arabidopsis thaliana
  misc_feature: Ceres Annot ID no. 834509
  misc_feature: Encodes the peptide sequence at SEQ ID NO. 523
atgggtagcagtgagatggaaaaatcaggtaaagagaaagaacctaagactacaccgccttcgacttcttcatctgctcctgctactgttgtttcacaggaaccttcttctgctgtgagtgctggagtggctgttactcaagattggtctggcttccaggcttattctcctatgccgcctcatggttatgtagcatcaagtcctcaacctcatccttatatgtggggcgttcagcatatgatgccgccttatggaacaccgcctcatccgtatgttacgatgtatcctccaggtggcatgtatgctcatccttcattacctccggggtcttatccatatagtccctatgcaatgccttctcctaatggaatggctgaagcttctggtaatactggaagtgttattgagggtgatggtaaaccatctgatgggaaggaaaaattgccaatcaaaagatcaaaaggaagcttgggaagtttgaatatgattataggaaagaacaatgaagctggaaaaaactcaggagcatcagctaatggagcttgttctaaaagtgctgagagcggttctgatggatcaagtgacggaagtgatgcaaattcacaaaacgactctggctctagacacaacgggaaggatggtgaaacagcttcagagagtggtggttctgctcatggaccaccccgtaatggaagtaatctaccagtgaaccagaccgtcgctatcatgccagtgtcggctacaggtgttccaggcccaccaacaaatctaaatatcggaatggattattggagcggtcatgggaatgtttctggagcagttcctggagttgtagtagatggttcccaatcacagccatggttacaggatgagagagagattaagcgacagagacggaagcaatccaatagggaatctgctcgtagatccaggttgcgtaaacaggcggagtgtgatgagctagcacaacgagcagaggttttgaatggagagaactcaagtcttagagcagaaattaacaagcttaaaagccaatatgaagagcttcttgctgaaaatagctctctcaagaataagttctcgtcagccccgtcactggaaggtggagacttggacaagaacgagcaagaaccacagagaagtacacgtcaggatgttgcgtag

SEQ ID NO: 523 - protein, 387 aa, Arabidopsis thaliana
  misc_feature (1)..(205): Pfam name: MFMR Pfam desc: G-box binding protein MFMR
  misc_feature (291)..(354): Pfam name: bZIP_1 Pfam desc: bZIP transcription factor
  misc_feature (291)..(345): Pfam name: bZIP_2 Pfam desc: Basic region leucine zipper
  misc_feature: Ceres Annot ID no. 834509
  misc_feature: Bit score of 826.7 for HMM based on sequences of Figure 6
  misc_feature: Functional Homolog Of Ceres Clone ID no. 258841 at SEQ ID NO. 521
MGSSEMEKSGKEKEPKTTPPSTSSSAPATVVSQEPSSAVSAGVAVTQDWSGFQAYSPMPPHGYVASSPQPHPYMWGVQHMMPPYGTPPHPYVTMYPPGGMYAHPSLPPGSYPYSPYAMPSPNGMAEASGNTGSVIEGDGKPSDGKEKLPIKRSKGSLGSLNMIIGKNNEAGKNSGASANGACSKSAESGSDGSSDGSDANSQNDSGSRHNGKDGETASESGGSAHGPPRNGSNLPVNQTVAIMPVSATGVPGPPTNLNIGMDYWSGHGNVSGAVPGVVVDGSQSQPWLQDEREIKRQRRKQSNRESARRSRLRKQAECDELAQRAEVLNGENSSLRAEINKLKSQYEELLAENSSLKNKFSSAPSLEGGDLDKNEQEPQRSTRQDVA

SEQ ID NO: 524 - DNA, 1567 bp, Arabidopsis thaliana
  misc_feature: Ceres Annot ID no. 866384
  misc_feature: Encodes the peptide sequence at SEQ ID NO. 525
ttctaatcaatctcactccaatttctgcaaaaatcaaaccttttttttatattcatttcacatctctgtttttcctcagattcctcaaacattacagatcttcaggttttctatttataagcagaacttgttctgttcttgtgtgaagctttcactggttttggaaattggtgaatgtgattaatgggtagcagtgagatggaaaaatcaggtaaagagaaagaacctaagactacaccgccttcgacttcttcatctgctcctgctactgttgtttcacaggaaccttcttctgctgtgagtgctggagtggctgttactcaagattggtctggcttccaggcttattctcctatgccgcctcatggttatgtagcatcaagtcctcaacctcatccttatatgtggggcgttcagcatatgatgccgccttatggaacaccgcctcatccgtatgttacgatgtatcctccaggtggcatgtatgctcatccttcattacctccggggtcttatccatatagtccctatgcaatgccttctcctaatggaatggctgaagcttctggtaatactggaagtgttattgagggtgatggtaaaccatctgatgggaaggaaaaattgccaatcaaaagatcaaaaggaagcttgggaagtttgaatatgattataggaaagaacaatgaagctggaaaaaactcaggagcatcagctaatggagcttgttctaaaagtgctgagagcggttctgatggatcaagtgacggaagtgatgcaaattcacaaaacgactctggctctagacacaacgggaaggatggtgaaacagcttcagagagtggtggttctgctcatggaccaccccgtaatggaagtaatctaccagtgaaccagaccgtcgctatcatgccagtgtcggctacaggtgttccaggcccaccaacaaatctaaatatcggaatggattattggagcggtcatgggaatgtttctggagcagttcctggagttgtagtagatggttcccaatcacagccatggttacaggtttctgatgagagagagattaagcgacagagacggaagcaatccaatagggaatctgctcgtagatccaggttgcgtaaacaggcggagtgtgatgagctagcacaacgagcagaggttttgaatggagagaactcaagtcttagagcagaaattaacaagcttaaaagccaatatgaagagcttcttgctgaaaatagctctctcaagaataagttctcgtcagccccgtcactggaaggtggagacttggacaagaacgagcaagaaccacagagaagtacacgtcaggatgttgcgtagacggctcgtggttccttccacaactcagcttgactcaagaacagcagctaacagatatatgtaattttaggaaccagatttggtgtgatttctttagtgtttaaataggaggaagcatgaaaaaaaaaaatagtctcttctttaacaaactgtgtatatcttttcttcagattttggacttttttgtctctcaataaaatgaactcggaactct

SEQ ID NO: 525 - protein, 389 aa, Arabidopsis thaliana
  misc_feature (1)..(205): Pfam name: MFMR Pfam desc: G-box binding protein MFMR
  misc_feature (293)..(356): Pfam name: bZIP_1 Pfam desc: bZIP transcription factor
  misc_feature (293)..(347): Pfam name: bZIP_2 Pfam desc: Basic region leucine zipper
  misc_feature: Ceres Annot ID no. 866384
  misc_feature: Bit score of 816.7 for HMM based on sequences of Figure 6
  misc_feature: Functional Homolog Of Ceres Clone ID no. 258841 at SEQ ID NO. 521
MGSSEMEKSGKEKEPKTTPPSTSSSAPATVVSQEPSSAVSAGVAVTQDWSGFQAYSPMPPHGYVASSPQPHPYMWGVQHMMPPYGTPPHPYVTMYPPGGMYAHPSLPPGSYPYSPYAMPSPNGMAEASGNTGSVIEGDGKPSDGKEKLPIKRSKGSLGSLNMIIGKNNEAGKNSGASANGACSKSAESGSDGSSDGSDANSQNDSGSRHNGKDGETASESGGSAHGPPRNGSNLPVNQTVAIMPVSATGVPGPPTNLNIGMDYWSGHGNVSGAVPGVVVDGSQSQPWLQVSDEREIKRQRRKQSNRESARRSRLRKQAECDELAQRAEVLNGENSSLRAEINKLKSQYEELLAENSSLKNKFSSAPSLEGGDLDKNEQEPQRSTRQDVA

SEQ ID NO: 526 - DNA, 1382 bp, Arabidopsis thaliana
  misc_feature: Ceres Annot ID no. 880496
  misc_feature: Encodes the peptide sequence at SEQ ID NO. 527
ctctccgacagattcaatgaagcagcaaaagagataaaaccctaacaaaagtaaacaatcggagttttaatcttcttcttcttcggagccggagttttgtctgatctgtcggagaggacgtgtcggcatctattaaaatcctagctggacttccacatcactttactcaattagaagctgttttgagtaacacaagtaagtagtaagcttataaaacaatgggaacgagcgaagacaagatgccatttaagactaccaaaccaacatcttcggctcaggaagttcctcccacaccgtatccagattggcaaaattcaatgcaggcttattatggcggaggaggtactccaaatccttttttcccatccccagttggatctcctagtcctcacccctatatgtggggtgctcaacaccatatgatgccgccttatggcaccccagttccgtacccagcaatgtatcccccgggggcagtctatgctcatcctagcatgcccatgcctcctaattctggtcctaccaacaaggagcctgcgaaggaccaagcttctggcaagaagtcaaaggggaactcgaaaaaaaaggctgaaggaggtgataaagcgctctctggttcagggaacgatggtgcctctcatagtgatgaaagtgtcacagcgggttcatctgatgaaaatgatgagaatgccaatcaacaggaacagggttcaattcgaaagccaagctttggacagatgcttgctgacgcaagttctcaaagtacgactggtgaaatccaaggttcggtgcccatgaagccggtagccccggggactaatctgaatatcgggatggacttatggtcttcccaagctggtgtaccagtgaaggatgaacgagagctcaagcggcagaagaggaaacaatctaaccgtgaatccgctaggcggtctagattgcggaagcaggccgaatgcgaacaacttcaacaaagagtagagagtttgtcgaacgagaatcaaagcctgagagatgagctacagagactctcaagcgaatgtgataagctcaagtctgagaacaactcaatccaggatgagttgcagagagtacttggagcagaggctgtagctaatctagaacagaatgctgctgggtcgaaagatggtgaaggaacaaattaacacttaggaaaattggaactttacaacggattattgggatttttcaacaccggataaaaaaaactgagtccaaagtcatttgagattacgtaactatacaatcgtttgacatttttgtgtaatagagatttgacctacaagactgtagaagctgcaaaagctacgattacactttgttttattagtcttcgtgattggaatcggattctgaatccg

SEQ ID NO: 527 - protein, 315 aa, Arabidopsis thaliana
  misc_feature (1)..(159): Pfam name: MFMR Pfam desc: G-box binding protein MFMR
  misc_feature (220)..(283): Pfam name: bZIP_1 Pfam desc: bZIP transcription factor
  misc_feature (220)..(274): Pfam name: bZIP_2 Pfam desc: Basic region leucine zipper
  misc_feature: Ceres Annot ID no. 880496
  misc_feature: Bit score of 345.5 for HMM based on sequences of Figure 6
  misc_feature: Functional Homolog Of Ceres Clone ID no. 258841 at SEQ ID NO. 521
MGTSEDKMPFKTTKPTSSAQEVPPTPYPDWQNSMQAYYGGGGTPNPFFPSPVGSPSPHPYMWGAQHHMMPPYGTPVPYPAMYPPGAVYAHPSMPMPPNSGPTNKEPAKDQASGKKSKGNSKKKAEGGDKALSGSGNDGASHSDESVTAGSSDENDENANQQEQGSIRKPSFGQMLADASSQSTTGEIQGSVPMKPVAPGTNLNIGMDLWSSQAGVPVKDERELKRQKRKQSNRESARRSRLRKQAECEQLQQRVESLSNENQSLRDELQRLSSECDKLKSENNSIQDELQRVLGAEAVANLEQNAAGSKDGEGTN

SEQ ID NO: 528 - DNA, 1698 bp, Arabidopsis thaliana
  misc_feature: Ceres Annot ID no. 862435
  misc_feature: Encodes the peptide sequence at SEQ ID NO. 529
aaaaaaaaaaactgaactctttttcgctctggtttttttagagagagagaaagatgaaaatgcgtttaattgctgtttaggtttcgaattcgcgatttaaatttctgggtttctctctgtttaagcttcttcttcttcatcttctgcttacgtttcttcttcaaggagctttcggattcttgtagaaagagtcattgttctcttgagtgggaaaccttgaaaccattcctatgggaaatagcagcgaggaaccaaagcctcctaccaaatcagataaaccatcttcacccccggtggatcaaacaaatgttcatgtctaccctgattgggcagctatgcaggcatattatggtccaagagtagcaatgcctccttattacaattcagctatggctgcatctggtcatcctcctcctccttacatgtggaatcctcagcatatgatgtcaccatatggagcaccctatgctgctgtttatcctcatggaggaggagtttacgctcatcccggtattcccatgggatcactgcctcaaggtcaaaaggatccacctttaacaactccggggacgcttttgagcatcgacactcctactaaatctacagggaacacagacaatggattgatgaagaagctgaaagagtttgatgggcttgctatgtctctaggaaatgggaatcctgaaaatggtgcagatgaacataaacgatcacggaacagctcagaaactgatggttctactgatggaagtgatgggaatacaactggggcagatgaaccgaaacttaaaagaagtcgagagggaactccaacaaaagatgggaaacaattggttcaagctagctcatttcattctgtttctccgtcaagtggtgataccggcgtaaaactcattcaaggatctggagctatactctctcctggtgtaagtgcaaattccaaccccttcatgtcacaatctttagccatggttcctcctgaaacttggcttcagaacgagagagaactgaaacgggagcgaaggaaacagtctaatagagaatctgctagaaggtcaagattaaggaaacaggccgagacagaagaacttgctaggaaagtggaagccttgacagccgaaaacatggcattaagatctgaactaaaccaacttaatgagaaatctgataaactaagaggagcaaatgcaaccttgttggacaaactgaaatgctcggaacccgaaaagagagtccccgcaaatatgttgtctagagttaagaactcaggagctggagataagaacaagaaccaaggagacaatgattctaactctacaagcaaattgcatcaactgctcgatacgaagcctcgagctaaagcagtagctgcaggctgatcgatggtaattcatgtcgatttctacttaatttgtcgacataaacaaagaaaataagtgctactaatttcagaaaaacttgatagatagtatagtagagagagagagagagagagaggtgtgatgattattgatctataaattttcggagagagagagggagaaagagaaacttttcctccagatgaaaatttggtgttatggtttgttactgttaatatagagaggcttttctttttttataaaatggcttcctttgttgcatttccttgttttagacctgatgtaattttatgaaatcggtgttattgctttgcgt

SEQ ID NO: 529 - protein, 382 aa, Arabidopsis thaliana
  misc_feature (1)..(182): Pfam name: MFMR Pfam desc: G-box binding protein MFMR
  misc_feature (257)..(320): Pfam name: bZIP_1 Pfam desc: bZIP transcription factor
  misc_feature (257)..(311): Pfam name: bZIP_2 Pfam desc: Basic region leucine zipper
  misc_feature: Ceres Annot ID no. 862435
  misc_feature: Bit score of 434.8 for HMM based on sequences of Figure 6
  misc_feature: Functional Homolog Of Ceres Clone ID no. 258841 at SEQ ID NO. 521
MGNSSEEPKPPTKSDKPSSPPVDQTNVHVYPDWAAMQAYYGPRVAMPPYYNSAMAASGHPPPPYMWNPQHMMSPYGAPYAAVYPHGGGVYAHPGIPMGSLPQGQKDPPLTTPGTLLSIDTPTKSTGNTDNGLMKKLKEFDGLAMSLGNGNPENGADEHKRSRNSSETDGSTDGSDGNTTGADEPKLKRSREGTPTKDGKQLVQASSFHSVSPSSGDTGVKLIQGSGAILSPGVSANSNPFMSQSLAMVPPETWLQNERELKRERRKQSNRESARRSRLRKQAETEELARKVEALTAENMALRSELNQLNEKSDKLRGANATLLDKLKCSEPEKRVPANMLSRVKNSGAGDKNKNQGDNDSNSTSKLHQLLDTKPRAKAVAAG

SEQ ID NO: 530 - DNA, 1497 bp, Arabidopsis thaliana
  misc_feature: Ceres Clone ID no. 16533
  misc_feature: Encodes the peptide sequence at SEQ ID NO. 531
accgaactctggttctagagagagaaaccattctctccgactaagagagagaagcgaatttgtttttttttcttttgtgggttcaattcgaattgttttccctgagactcaagttactgtgtcattactctgcattgagcaatgggtagcaacgaagaaggaaaccccactaacaactctgataagccatcgcaagctgctgctcctgaccagagtaatgttcatgtgtatcatcatgactgggctgctatgcaggcatattatgggcctagagttggtatacctcaatattacaactcaaatttggcgcctggtcatgctccaccgccttatatgtgggcgtctccatcgccaatgatggctccttatggagcaccatatccaccattttgccctcctggtggagtttatgctcatcctggtgttcaaatgggctcacaaccacaaggtcctgtttctcaatcagcatctggagttacaacccctttgaccattgatgcaccagctaattcagctggaaactcagatcatgggttcatgaaaaagctgaaagagttcgatggacttgcaatgtcaataagcaataacaaagttgggagtgctgaacatagcagcagtgaacataggagttctcagagctccgagaatgatggctctagcaatggtagtgatggtaatacaactgggggagaacaatctaggaggaaaagaaggcaacaaagatcaccaagcactggtgaaagaccctcatctcaaaacagtctgcctcttagaggtgaaaatgagaaacccgatgtgactatggggactcctgttatgcccacagcaatgagtttccaaaactctgctggcatgaacggtgtgccacagccatggaatgaaaaagaggttaaacgagagaagagaaaacagtcaaaccgagaatctgctaggaggtcaagactgaggaagcaggctgaaacagaacaactatctgtcaaagttgacgcattagtagctgagaacatgtctctgaggtctaaactaggccagctaaacaatgagtctgagaaactacggctggagaacgaagctatattggatcaactgaaagcgcaagcaacagggaaaacagagaacctgatctctcgagttgataagaacaactctgtatcaggtagcaaaactgtgcagcatcaactgttaaatgcaagtccgataaccgatcctgtcgcggctagctgaccgtggccgcaacaatgagaacccgatatttcttcctttgggttgtgattgtaacttaaaaggagactttttgtttttattcttagatttgtagctctctgcatagtgagcagaaattgatgtaatatggtttaagagattcggtgttctctggtgtgtgctgcaaccacataattggtgatagataggtttagttatataagcaaatgtattagagataaggggagacatatttgatggtctttcgtttcgtaaacacacttttcttatgcg

SEQ ID NO: 531 - protein, 360 aa, Arabidopsis thaliana
  misc_feature (1)..(184): Pfam name: MFMR Pfam desc: G-box binding protein MFMR
  misc_feature (247)..(310): Pfam name: bZIP_1 Pfam desc: bZIP transcription factor
  misc_feature (247)..(301): Pfam name: bZIP_2 Pfam desc: Basic region leucine zipper
  misc_feature: Ceres Clone ID no. 16533
  misc_feature: Bit score of 317.2 for HMM based on sequences of Figure 6
  misc_feature: Functional Homolog Of Ceres Clone ID no. 258841 at SEQ ID NO. 521
MGSNEEGNPTNNSDKPSQAAAPDQSNVHVYHHDWAAMQAYYGPRVGIPQYYNSNLAPGHAPPPYMWASPSPMMAPYGAPYPPFCPPGGVYAHPGVQMGSQPQGPVSQSASGVTTPLTIDAPANSAGNSDHGFMKKLKEFDGLAMSISNNKVGSAEHSSSEHRSSQSSENDGSSNGSDGNTTGGEQSRRKRRQQRSPSTGERPSSQNSLPLRGENEKPDVTMGTPVMPTAMSFQNSAGMNGVPQPWNEKEVKREKRKQSNRESARRSRLRKQAETEQLSVKVDALVAENMSLRSKLGQLNNESEKLRLENEAILDQLKAQATGKTENLISRVDKNNSVSGSKTVQHQLLNASPITDPVAAS

SEQ ID NO: 532 - DNA, 1367 bp, Glycine max
  misc_feature: Ceres Clone ID no. 540068
  misc_feature: Encodes the peptide sequence at SEQ ID NO. 533
atcaagagaaggtttttctgagctgatctggatgggaactgatgaagaaagcacagctaaagtttctaaaccatcttctacttcttctactaagataccactggcaccttcatatcctgattggtcaagctcggtgcaggcttactatgctcctggagtcacaccacgtgcattttttgcctcaactgttgcttccccaactccccatccttatttgtggggaagccagcagcctctaattccaccatatgttactcctgttccatatccagctatatatcctcctgggaatgtctatgctcatccaagcatggcaacgaccccaagcaccacacagaatggtacagagttattaggaaaggagtctgatggaaaagatcgggtttctgccaaaagttcgaagggtgtgtctacaaacagtggttccaaagcaggagacaatggaaaggcaggctcaggttctggaaatgatggtgtctcacaaagtgctgaaagtggttcagagggatcttcagatgctagtgatgagaatactgaccaacaggaatcagctacaaacaagaaagggagttttgaccaaatgcttgttgatggagccaatgcacggaagaattctgtgagcaccattcctcattcttcagtacctggaaatcccgctgtctcaatgtctccaactagtcttaatattggaatggacttgtgggacgcatctcctgctggtgccgaagctgcaaaaatgagacataatcagtcttctgcctcagaagctgttactcctccaaccataatgggacgtgaagtcccgcttggtgaacaatggatacaagacgatcgtgaactaaagaaacagaaaaggaaacagtctaatagggagtctgctaggaggtcaaggctacgcaagcaggctgagtgtgaagagttacaaaagagggtggagtctytgagaagtgagaatcgaattctcagagaagagcttcagagagtatctgaagaatgcaagaaacttacatctgaaaatgattccatcaaggaagagttagaacgaatgtgtggttcagaagcaattgctaatcttgaatgaatcagcttcttattatcatgccaaagcaacggcgaaaaattatcaactcccaaaagacacgaatttgcagctgaaattttatcaatggcgaaattgagcataggatataatttttttccttggtttactatttttaccattaacccttaattgtcactccccttatgttttgcccgtttagtattgtaaaacaaattatagcaaaatatttttttcaacacttttattgggcagatttttatatgtaggttatatagtaaataaccttggcctacattatttatcg

SEQ ID NO: 533 - protein, 349 aa, Glycine max
  misc_feature (1)..(173): Pfam name: MFMR Pfam desc: G-box binding protein MFMR
  misc_feature (267)..(330): Pfam name: bZIP_1 Pfam desc: bZIP transcription factor
  misc_feature (267)..(321): Pfam name: bZIP_2 Pfam desc: Basic region leucine zipper
  misc_feature: Ceres Clone ID no. 540068
  misc_feature: Bit score of 377.4 for HMM based on sequences of Figure 6
  misc_feature: Bit score of 377.4 for HMM based on sequences of Figure 6
  misc_feature: Functional Homolog Of Ceres Clone ID no. 258841 at SEQ ID NO. 521
  misc_feature (304)..(304): Xaa is any aa, unknown, or other
MGTDEESTAKVSKPSSTSSTKIPLAPSYPDWSSSVQAYYAPGVTPRAFFASTVASPTPHPYLWGSQQPLIPPYVTPVPYPAIYPPGNVYAHPSMATTPSTTQNGTELLGKESDGKDRVSAKSSKGVSTNSGSKAGDNGKAGSGSGNDGVSQSAESGSEGSSDASDENTDQQESATNKKGSFDQMLVDGANARKNSVSTIPHSSVPGNPAVSMSPTSLNIGMDLWDASPAGAEAAKMRHNQSSASEAVTPPTIMGREVPLGEQWIQDDRELKKQKRKQSNRESARRSRLRKQAECEELQKRVESXRSENRILREELQRVSEECKKLTSENDSIKEELERMCGSEAIANLE

SEQ ID NO: 534 - protein, 422 aa, Spinacia oleracea
  misc_feature (1)..(185): Pfam name: MFMR Pfam desc: G-box binding protein MFMR
  misc_feature (278)..(341): Pfam name: bZIP_1 Pfam desc: bZIP transcription factor
  misc_feature (278)..(332): Pfam name: bZIP_2 Pfam desc: Basic region leucine zipper
  misc_feature: Public GI ID no. 2815305
  misc_feature: in Figure 6
  misc_feature: Bit score of 862.4 for HMM based on sequences of Figure 6
  misc_feature: Functional Homolog Of Ceres Clone ID no. 258841 at SEQ ID NO. 521
MGSSDDVKSPKSEKTSPPATEHNGVHMYPDWAAMQAYYGPRVALPPYFNSAVAPGHPPPPYMWGPPQPMVPPYGAPYAAIYAPGGVYAHPAIPLASQAHGQEVAPPAVSEPLVATPLSMDTPAKSPKNADKGFIKKLKGFNGLAMSIGNGNTEKTEGDVENRLSQSAESEGSSNGSDGNYTEDADDNKRKRSREGTPISVEAEKTEIKAVLPPPADKVLGIPVTSANAVAGQVMGTVVSPGVATTLELRNPGVTVKGNSSPVSSPNGVVSSEAWLQTQRELKRERRKQSNRESARRSRLRKQAETEELARRVESLSAENMALKSEVNLLVENSQKLRLENAALTGKLKNLQSGQGDENGLANVDTKRNPSDSTENLLSRVNNSSSVGRNSDEGAEMFGKSAKSGAKFHQLLDNRRGDAVAAR

SEQ ID NO: 535 - DNA, 1475 bp, Gossypium hirsutum
  misc_feature: Ceres Clone ID no. 1973300
  misc_feature: Encodes the peptide sequence at SEQ ID NO. 536
aacgcctttaaacaggtgctttctaaaagcggtcgaggacatacagatttgattcttgatttgttgaaattaagacgtttacataagtgatatgggaacggaagaggagagcacaccagccaagccttccaaacctactgcctcatcccaggaaatgccaacagtgtcatatcctgattggtcgacccaaatgcaggcttattatggtgctgcagctactcctccattatttgcctcaaacgttgcttcaccaaccccgcatccatacatatggggaggccagcatcctctaatgcctccatatggtaccccggttccgtacccagctgtatatcctccaaggggagtgtatgcgcatcctaatatggccccaatgccaagttctgcacggaataatggtgctgatggaaaggatcggggtgtgaccaaaaagcccaagggatcttcgggaagcaaagttggagagagtgcaaaggccacttcaggctcgggaaacgatggcggctctcaaagtggtgaaagtggcagcgagggtacatcagacagaagtgatgagagtaatcaacaagaagtcaatgctggcaaaaagggaagctttgagcagatgcttgcagatgccaatgcacagggtaaagctgctggggctttagttcccgcagaacccatagtctctatgcctgcaactactttgaatataggaatggacctatggagtgcttcccctgctgccacaggagctccaaaaaccagacctaacgcatctggccctgtagccactgttcctgctggtgctgtgatgcctgatcagtggattcaagatgaacgtgagttgaaaagacagaagaggaagcagtctaacagggaatctgctcggaggtcaaggttacgcaagcaggccgagtgtgaagagcttcaagccaaggtggagagcttggcaaatgaaaaccacacccttagagatgagttaaagaagctgtcagatgaatgcgagaagcttacatctgaaaatagttctatcaaggatgagttgatgcggatatgcggaccagaagcgataagtaacctggagcaaggcaacccttctccagttggtgaagcaggaggtgatgaggggaatggttaataagaaccctacggagataacttgaagggcagttcagtgatttcttggcatccatgattgttctttttaccatttcttgactcgataagtcatttgtttttattactaatttatacccttttaaccctttataactgtaattttattttacaagaaaaaaggaaagagttttaaccagagttcaagttgttgtgttgtagtctattgagaataatttgagaattttttaccacattttgatatagtgtagtgttcttatttaagatccatattatttggatttgaatttgggcaaaaataaattttttttatataagatttaacttcatcactacagtttggtgatttgatc

SEQ ID NO: 536 - protein, 343 aa, Gossypium hirsutum
  misc_feature (1)..(161): Pfam name: MFMR Pfam desc: G-box binding protein MFMR
  misc_feature (244)..(307): Pfam name: bZIP_1 Pfam desc: bZIP transcription factor
  misc_feature (244)..(298): Pfam name: bZIP_2 Pfam desc: Basic region leucine zipper
  misc_feature: Ceres Clone ID no. 1973300
  misc_feature: in Figure 6
  misc_feature: Bit score of 601.5 for HMM based on sequences of Figure 6
  misc_feature: Functional Homolog Of Ceres Clone ID no. 258841 at SEQ ID NO. 521
MGTEEESTPAKPSKPTASSQEMPTVSYPDWSTQMQAYYGAAATPPLFASNVASPTPHPYIWGGQHPLMPPYGTPVPYPAVYPPRGVYAHPNMAPMPSSARNNGADGKDRGVTKKPKGSSGSKVGESAKATSGSGNDGGSQSGESGSEGTSDRSDESNQQEVNAGKKGSFEQMLADANAQGKAAGALVPAEPIVSMPATTLNIGMDLWSASPAATGAPKTRPNASGPVATVPAGAVMPDQWIQDERELKRQKRKQSNRESARRSRLRKQAECEELQAKVESLANENHTLRDELKKLSDECEKLTSENSSIKDELMRICGPEAISNLEQGNPSPVGEAGGDEGNG

SEQ ID NO: 537 - DNA, 1155 bp, Populus balsamifera subsp. trichocarpa
  misc_feature: Ceres Annot ID no. 1538994
  misc_feature: Encodes the peptide sequence at SEQ ID NO. 538
atggttagcagtgatatggataaaactgggaaggaaaaggaggccaagccaccatctgctgctcctacacaggagcagccttcaactgccagtgctacaactgtaaatccagactggtctgggtttcaggcatattctcctatacctccacctgggttcttggcatcaagtccccaagctcacccgtatatgtggggggttcagcacatcatgcctccctatggtaccccaccacatccatatgtggcaatgtatccgcatggtgtatatgctcatccatccattcctccgggttcttatccttttagtccttttgcaatgccttctccaaatggtattgctgaggcttctggaaacactcctggcagcatggaagcagatggtaggccatctgatgctaaggaaaaactgccaattaaaagatcgaaaggaagtttgggcagtttaaacatgatcactgggaagaacaatgagcatggtaaaacaacaggagtgtctgccaacggagcttattctaagagtgctgagagtggtagtgaaggctccagtgaaggaagtgatgcaaattctcagagtgactcacaaatgaagtcaggtggcaggcaagattctctggaagcacatggtgctcagaatggaggacagggtgcatctaatacgatcatgaatcaaacgatggctatcatgccaatatctgctgccagtgctccaggagctatacctggccccacaaccaacttaaatattggaatggactactggggagcccctgcttcatctactgttcctgcaattcgtgggaaagttccttctactccagttgctggaggggtagtttctactggatcacgggatggtgttcaatcgcagatttggttacaggatgaaagagagcttaagagacagagaaggaagcagtcaaacagagaatccgctcgccggtccaggttgcgtaaacaggctgaatgtgatgaactggcccaacgtgctgaagccttaaaagaagaaaatgccaatcttagatcagaagtaaaccaaatcaagagcgagtatgagcaacttcttgcggagaacgcctctctcaaggaagattttagggctggcaggaatgaccaacatatgagcaatgatacacaacagactggacaaacatag

SEQ ID NO: 538 - protein, 379 aa, Populus balsamifera subsp. trichocarpa
  misc_feature (1)..(189): Pfam name: MFMR Pfam desc: G-box binding protein MFMR
  misc_feature (291)..(354): Pfam name: bZIP_1 Pfam desc: bZIP transcription factor
  misc_feature (291)..(345): Pfam name: bZIP_2 Pfam desc: Basic region leucine zipper
  misc_feature: Ceres Annot ID no. 1538994
  misc_feature: in Figure 6
  misc_feature: Bit score of 905.7 for HMM based on sequences of Figure 6
  misc_feature: Functional Homolog Of Ceres Clone ID no. 258841 at SEQ ID NO. 521
MDKTGKEKEAKPPSAAPTQEQPSTASATTVNPDWSGFQAYSPIPPPGFLASSPQAHPYMWGVQHIMPPYGTPPHPYVAMYPHGVYAHPSIPPGSYPFSPFAMPSPNGIAEASGNTPGSMEADGRPSDAKEKLPIKRSKGSLGSLNMITGKNNEHGKTTGVSANGAYSKSAESGSEGSSEGSDANSQSDSQMKSGGRQDSLEAHGAQNGGQGASNTIMNQTMAIMPISAASAPGAIPGPTTNLNIGMDYWGAPASSTVPAIRGKVPSTPVAGGVVSTGSRDGVQSQIWLQDERELKRQRRKQSNRESARRSRLRKQAECDELAQRAEALKEENANLRSEVNQIKSEYEQLLAENASLKEDFRAGRNDQHMSNDTQQTGQT

SEQ ID NO: 539 - DNA, 1976 bp, Glycine max
  misc_feature: Ceres Clone ID no. 1611686
  misc_feature: Encodes the peptide sequence at SEQ ID NO. 540
ggccaatcaccccttacataaaaaacaaaatttgggagcacagcggcaaggggagtaaacgagctttccactttgattctttccgaaatcgaagctgtaacgaaatctctgccacgggacagcgacaccgtacgaccttcccattgtttcctcaacgtgaacaatacaacaccacaccaccacccactaacaatacctaaagcctaacgaaccctaattcttgatcattgctcaattctttgttcccttcccatctcggagacacgaattcgccttcttcctcatttcccaaacaaatttcccctccgcactcccccaatttattctttttttcgcattttattttacccttttgaacctgtggcttcttttcgacgccccccatgtatcagaatggattagtgtaaattattggaaggtacctatataaaagcatgggcagtagtgacatggacaaaaccccgaaagaggagtctaagacacctccagctacgtcacaggagcagtcatcaacaactggcatgccaacaactaatcctgactggtctaactttcagacgtattctcctatacctccacatgggttcttggcatcaagcccccaagcccacccatatatgtggggcgtccagcatattatgcctccctatggcactccacctcatccctatgttgcaatgtatccccatggtggcatatatgctcatccatccattcctccgggatcttatcctttcagtccttttgccatggcttctccaaatggtattgcagatgcttcaggaaatgccccaggtagcatcgaagttggtggtaaacctcctgaaatgaaggaaaaattacctatcaaaagatcaaaaggaagtgttagtggtggtaatttgagcatgtggattactgggaaaaataatgaacctggtaaaacaccaggagaatctgctaatgggattcattccaaaagtggtgaaagtgcaagtgacggaactagtgaaggaagtgatgagaactcccagaatgactctcaattgaaatccggggagaagcaggactcttttgaagatgaaccatctcaaaatggcagtccagtacatgctcctcaaaatggggtacataatagatctcagacagttgttaatcaaactatgcctatcttacctatatcttccacaagtgctagtggagcagttcctggtcccacaactaatttaaatataggaatggattattggggcacaccaacttcatccaccattcctgcactgcatggaaaggttccttctgctgcagttgctggagggatgattgctgctggatcacgagatggcgttcagccacaagtttggctgcaggacgaaagagagcttaaaagacaaagacggaaacagtctaatcgggagtctgcacgcagatccaggttacggaagcaggccgaatgtgatgaactagctcagcgtgctgaagctttgaaagaagaaaatgccagtctccgatcagaagtgagccggatcaggagtgagtatgagcagctacgttctgagaatgctgccctcaaggatagacttggggagatacctggtgtcacgacacctgggaaggaggatcttaggtctggccagaatgatcagcatgtgagtaatgacactcaacaaagtggtcagacagatgttgtgcatggtgttcattaggatcttgcttcctgctgcatgttgctttttaggaagataacctaaccatgtagcaacagcaagttctagtttttggatagctttggttcaaattgtattaaaggtgatcatatgtagtattaggatctatttatgtcatatgatccctcattcctaatttgtcatgtttatgatggcaaaaaacttgtattgtaggtagggtgtgaatacttacttggtcataccttctctgctacttcgtaagttagtgttagcagcaagaagtatgattaccgaaattagttattgtcc

SEQ ID NO: 540 - protein, 416 aa, Glycine max
  misc_feature (1)..(196): Pfam name: MFMR Pfam desc: G-box binding protein MFMR
  misc_feature (307)..(370): Pfam name: bZIP_1 Pfam desc: bZIP transcription factor
  misc_feature (307)..(361): Pfam name: bZIP_2 Pfam desc: Basic region leucine zipper
  misc_feature: Ceres Clone ID no. 1611686
  misc_feature: in Figure 6
  misc_feature: Bit score of 965.8 for HMM based on sequences of Figure 6
  misc_feature: Functional Homolog Of Ceres Clone ID no. 258841 at SEQ ID NO. 521
MGSSDMDKTPKEESKTPPATSQEQSSTTGMPTTNPDWSNFQTYSPIPPHGFLASSPQAHPYMWGVQHIMPPYGTPPHPYVAMYPHGGIYAHPSIPPGSYPFSPFAMASPNGIADASGNAPGSIEVGGKPPEMKEKLPIKRSKGSVSGGNLSMWITGKNNEPGKTPGESANGIHSKSGESASDGTSEGSDENSQNDSQLKSGEKQDSFEDEPSQNGSPVHAPQNGVHNRSQTVVNQTMPILPISSTSASGAVPGPTTNLNIGMDYWGTPTSSTIPALHGKVPSAAVAGGMIAAGSRDGVQPQVWLQDERELKRQRRKQSNRESARRSRLRKQAECDELAQRAEALKEENASLRSEVSRIRSEYEQLRSENAALKDRLGEIPGVTTPGKEDLRSGQNDQHVSNDTQQSGQTDVVHGVH

SEQ ID NO: 541 - protein, 424 aa, Psophocarpus tetragonolobus
  misc_feature (1)..(183): Pfam name: MFMR Pfam desc: G-box binding protein MFMR
  misc_feature (278)..(341): Pfam name: bZIP_1 Pfam desc: bZIP transcription factor
  misc_feature (278)..(332): Pfam name: bZIP_2 Pfam desc: Basic region leucine zipper
  misc_feature: Public GI ID no. 51870705
  misc_feature: in Figure 6
  misc_feature: Bit score of 889.7 for HMM based on sequences of Figure 6
  misc_feature: Functional Homolog Of Ceres Clone ID no. 258841 at SEQ ID NO. 521
MGNSEEGKSIKTGSPSSPATTDQTNQPSIHVYPDWAAMQYYGPRVNIPPYFNSAVASGHAPHPYMWGSPQAMMPPYGPPYAAFYSHGGVYTHPAVAIGPHPHGQGVPSPPAAGTPSSVESPTKLSGNTDQGLMKKLKGFDGLAMSIGNCNAESAERGAENRLSQSADTEGSSDGSDGNTAGANKMRRKRSREGTPTTDGEGKTETQEGSVSKETASSRKIMPATPASVAGNLVGPIVSSGMTTALELRNPSTVHSKANNTSAPQPCAVVPSEAWLQNERELKRERRKQSNRESARRSRLRKQAETEELARKVEMLSTENVSLKSEITQLTESSEQMRMENSALREKLRNTQLGQTEEILLTSIDSKRGATPVSTENLLSRVNNSSSNDRTAENENDFCENKPNSGAKLHQLLDANPRADAVAAG

SEQ ID NO: 542 - DNA, 1158 bp, Sorghum bicolor
  misc_feature: Ceres Annot ID no. 6047730
  misc_feature: Encodes the peptide sequence at SEQ ID NO. 543
atgggaagcagtggagcagatacaccgtctaagacaaccaaggcatctgcccctcaggagcagcagccacctgctacctcaggtgctgcaacaccggctgtttatcctgattggtccagcttccaggcatatcctccaatcccaccacatgggttcttcccttcacctgtggcatcaagtccacagggtcatccttacatgtggggagctcagcctatgattccaccatatggaacaccaccgccaccatatgtcatgtaccctcctggagtatatgcccacccatctatgcccccgggtgcacatccatttactccttatgccattacttctccaaatggcaatgctgatgctactggaactactgctgcagctggtgatactgatggcaaaccctctgaaggcaaagataaaagtccaacaaagagatccaaaggaagtttgggcagcttgaacatgcttactggaaagaataccggtgaacatggtaagacctctggtgcatcggctaatggagccacttctcaaagtggcgaaagtggcagtgacagttcaagtgaagggagtgaagaaaattctcataatgattcacatcacaaggaaagtggacaggagcaagatggagatgttcgaagttcccagaatggtgcatcacgttcaccatctgagggaaaattgaaccaagctatgacaatcgtgcccatgccatcaagtggcccagtaactggtccaactacaaacctaaatattggaatggactattgggccaacacagcaagctctgctcctgcaattcatggcaaagtgaccccaacaacagttccaggggctgtggtcccagcagagcaatggatacaggatgaacgtgaactcaaaaggcaaagaagaaagcagtccaatagggagtctgcacgcagatctaggttgcgtaaacaggctgaatgtgaggagttggctcaacgtgcagatgttttaaagcaggaaaatgcttcacttagagatgaagtaaatcgtatcagaaaagagtatgaggaacttctatcaaagaataactcactaaaggaaaagcttgaaggcaaacaacacaaaactgatgaggcaggacttaacaacaagctgcaacattctggcgatgacagccagaaaaaaggaaactaa

SEQ ID NO: 543 - protein, 385 aa, Sorghum bicolor
  misc_feature (1)..(197): Pfam name: MFMR Pfam desc: G-box binding protein MFMR
  misc_feature (288)..(351): Pfam name: bZIP_1 Pfam desc: bZIP transcription factor
  misc_feature (288)..(342): Pfam name: bZIP_2 Pfam desc: Basic region leucine zipper
  misc_feature: Ceres Annot ID no. 6047730
  misc_feature: in Figure 6
  misc_feature: Bit score of 908.3 for HMM based on sequences of Figure 6
  misc_feature: Functional Homolog Of Ceres Clone ID no. 258841 at SEQ ID NO. 521
MGSSGADTPSKTTKASAPQEQQPPATSGAATPAVYPDWSSFQAYPPIPPHGFFPSPVASSPQGHPYMWGAQPMIPPYGTPPPPYVMYPPGVYAHPSMPPGAHPFTPYAITSPNGNADATGTTAAAGDTDGKPSEGKDKSPTKRSKGSLGSLNMLTGKNTGEHGKTSGASANGATSQSGESGSDSSSEGSEENSHNDSHHKESGQEQDGDVRSSQNGASRSPSEGKLNQAMTIVPMPSSGPVTGPTTNLNIGMDYWANTASSAPAIHGKVTPTTVPGAVVPAEQWIQDERELKRQRRKQSNRESARRSRLRKQAECEELAQRADVLKQENASLRDEVNRIRKEYEELLSKNNSLKEKLEGKQHKTDEAGLNNKLQHSGDDSQKKGN

SEQ ID NO: 544 - protein, 349 aa, Triticum aestivum
  misc_feature (1)..(166): Pfam name: MFMR Pfam desc: G-box binding protein MFMR
  misc_feature (250)..(313): Pfam name: bZIP_1 Pfam desc: bZIP transcription factor
  misc_feature (250)..(304): Pfam name: bZIP_2 Pfam desc: Basic region leucine zipper
  misc_feature: Public GI ID no. 122771
  misc_feature: in Figure 6
  misc_feature: Bit score of 670.8 for HMM based on sequences of Figure 6
  misc_feature: Functional Homolog Of Ceres Clone ID no. 258841 at SEQ ID NO. 521
MGSNDPSTPSKASKPPEQEQPPATTSGTTAPVYPEWPGFQGYPAMPPHGFFPPPVAAGQAHPYMWGPQHMVPPYGTPPPPYMMYPPGTVYAHPTAPGVHPFHYPMQTNGNLEPAGAQGAAPGAAETNGKNEPGKTSGPSANGVTSNSESGSDSESEGSDANSQNDSHSKENDVNENGSAQNGVSHSSSHGTFNKPMPLVPVQSGAVIGVAGPATNLNIGMDYWGATGSSPVPAMRGKVPSGSARGEQWDERELKKQKRKLSNRESARRSRLRKQAECEELGQRAEALKSENSSLRIELDRIKKEYEELLSKNTSLKAKLGESGGGGGSDAVPDMNERGDTNGGSHQKEP

SEQ ID NO: 545 - protein, 262 aa, Musa acuminata
  misc_feature (156)..(219): Pfam name: bZIP_1 Pfam desc: bZIP transcription factor
  misc_feature (156)..(210): Pfam name: bZIP_2 Pfam desc: Basic region leucine zipper
  misc_feature: Public GI ID no. 102140034
  misc_feature: in Figure 6
  misc_feature: Bit score of 348.2 for HMM based on sequences of Figure 6
  misc_feature: Functional Homolog Of Ceres Clone ID no. 258841 at SEQ ID NO. 521
MAYRTPETQGRPPEAKDKQITSKGTSKDGGELTGKWGNGGKGTSGAAENSSQSDDSATEGSSDTREDGSQPKDHSLARKRSYGNMIAEGEASHPLDTAEHSGANAESTYSGRSRTAKKLPVSAPGRATLPGSQTNLNIGMDFWGATHAGSVPMKDDRELRRERRKQSNRESARRSRLRKQQECEELARRVTDLESENSALRVEIESIKKLRGELKAENKSIMVSCFITCIICLGMAVILHVDMGWVQFLSSHGFCWSDPNCV

SEQ ID NO: 546 - protein, 390 aa, Oryza sativa subsp. indica
  misc_feature (1)..(202): Pfam name: MFMR Pfam desc: G-box binding protein MFMR
  misc_feature (293)..(356): Pfam name: bZIP_1 Pfam desc: bZIP transcription factor
  misc_feature (293)..(347): Pfam name: bZIP_2 Pfam desc: Basic region leucine zipper
  misc_feature: Public GI ID no. 125536186
  misc_feature: in Figure 6
  misc_feature: Bit score of 889.3 for HMM based on sequences of Figure 6
  misc_feature: Functional Homolog Of Ceres Clone ID no. 258841 at SEQ ID NO. 521
MGSSGADAPTKTSKASAPQEQQPPASSSTATPAVYPDWANFQGYPPIPPHGFFPSPVASSPQGHPYMWGAQPMIPPYGTPPPPYVMYPPGVYAHPSMPPGAHPFTPYAMASPNGNADPTGTTTTAAAAAGGETGGKSSEGKEKSPIKRSKGSLGSLNMITGKNSTEHGKTSGASANGAISQSGESGSESSSEGSEANSQNDSHHKESGQEQDGEVRSSQNGVSRSPSQAKLNQTMAIMPMTSSGPVPAPTTNLNIGMDYWANTASSTPAIHGKATPTAAPGSMVPGEQWVQDERELKRQRRKQSNRESARRSRLRKQAECEELAQRAEVLKQENASLRDEVNRIRKEYDELLSKNSSLKEKLEDKQHKTDEAGVDNKLQHSGDDSQKKGN

SEQ ID NO: 547 - protein, 376 aa, Zea mays
  misc_feature (1)..(188): Pfam name: MFMR Pfam desc: G-box binding protein MFMR
  misc_feature (279)..(342): Pfam name: bZIP_1 Pfam desc: bZIP transcription factor
  misc_feature (279)..(333): Pfam name: bZIP_2 Pfam desc: Basic region leucine zipper
  misc_feature: Bit score of 855.9 for HMM based on sequences of Figure 6
  misc_feature: Functional Homolog Of Ceres Clone ID no. 258841 at SEQ ID NO. 521
MGSSGADTPSKEQQPPATSGAAIPPVYPDWSSFQAYPPIPPHGFFPSPVASSPQGHPFMWGAQAMIPPYGTPPPYVMYPPGVYAHPSMPPGAHPFTPYAITSPNGNADATGTTAAAGNTDGKPSEGKDKSPTKRSKGSLGSLNMLTGKNPSEHGKSSGASGNGVTSQSGESGSDSSSEGSEGNSHNDSHHRESGQEHDGDVRSSRNGVSRLQSEGKLNQAMAILPIPSSGPATDPTTNLNIGMDYWANTASSAPAIHGKATSTTVPGAVVPAEQWTQDEHELKKQRRKQSNRESARRSRLRKQAECEELAQRADVLKQENASLRDEVNRIRKEYEELLSRNNSLKEKLEGKQHKTDEAGLNNKLQHSGDDSQKKGN

SEQ ID NO: 548 - protein, 382 aa, Zea mays
  misc_feature (1)..(195): Pfam name: MFMR Pfam desc: G-box binding protein MFMR
  misc_feature (285)..(348): Pfam name: bZIP_1 Pfam desc: bZIP transcription factor
  misc_feature (285)..(339): Pfam name: bZIP_2 Pfam desc: Basic region leucine zipper
  misc_feature: Bit score of 863.8 for HMM based on sequences of Figure 6
  misc_feature: Functional Homolog Of Ceres Clone ID no. 258841 at SEQ ID NO. 521
MGSSGADTSSKPNKASAPQEQQQPATSGAATPAVYPDWSSFQAYPPIPPHGFFPSPVASSPQGHPYMWGAQPMIPPYGAPPYVMYPPGVYAHPSMASGAHPFTPYAITSPNGNADATGTTAVACDTDGKPSEGKDKSPTKRPKGTLGSLNMLTGKNPSEHGKTSGASANGATSQSGESGSDSSSEGSEGNSHNDSYKHSGQEQDGDVRSSQNGASRSPSEGKFNQAMAIMPMPSSGPVTGPTTNLNIGMDYWANTASSAPVIHGKVTPTTVPGAVVPAEQWIQDERELKRQKRKQSNRESARRSRLRKQAECEELAQRADVLKQENASLRDEVNRIRKEYEELLSKNNSLKEKLEGKQHKTDEAGLNNKLQHSGNDIQKKGN

SEQ ID NO: 549 - protein, 382 aa, Zea mays
  misc_feature (1)..(195): Pfam name: MFMR Pfam desc: G-box binding protein MFMR
  misc_feature (285)..(348): Pfam name: bZIP_1 Pfam desc: bZIP transcription factor
  misc_feature (285)..(339): Pfam name: bZIP_2 Pfam desc: Basic region leucine zipper
  misc_feature: Bit score of 859.9 for HMM based on sequences of Figure 6
  misc_feature: Functional Homolog Of Ceres Clone ID no. 258841 at SEQ ID NO. 521
MGSSGADTSSKPNKASAPQEQQQPATSGAATPAVYPDWSSFQAYPPIPPHGFFPSPVASSPQGHPYMWGAQPMIPPYGAPPYVMYPPGVYAHPSMASGAHPFTPYAITSPNGNADATETTAVACDTDGKPSEGKDKSPTKRPKGTLGSLNMLTGKNPSEHGKTSGASANGATSQSGESGSDSSSEGSEGNSHNDSYKHSGQEQDGDVRSSQNGASRSPSEGKFNQAMAIMPMPSSGPVTGPTTNLNIGMDYWANTASSAPVIHGKVTPTTVPGAVVPAEQWIQDERELKRQKRKQSNRESARRSRLRKQAECEELAQRADVLKQENASLRDEVNRIRKEYEELLSKNNSLKEKLEGKQHKTDEAGLNNKLQHSGNDIQKKGN

SEQ ID NO: 550 - protein, 390 aa, Oryza sativa
  misc_feature (1)..(202): Pfam name: MFMR Pfam desc: G-box binding protein MFMR
  misc_feature (293)..(356): Pfam name: bZIP_1 Pfam desc: bZIP transcription factor
  misc_feature (293)..(347): Pfam name: bZIP_2 Pfam desc: Basic region leucine zipper
  misc_feature: Bit score of 891.4 for HMM based on sequences of Figure 6
  misc_feature: Functional Homolog Of Ceres Clone ID no. 258841 at SEQ ID NO. 521
MGSSGADAPTKTSKASAPQEQQPPASSSTATPAVYPDWANFQGYPPIPPHGFFPSPVASSPQGHPYMWGAQPMIPPYGTPPPPYVMYPPGVYAHPSMPPGAHPFTPYAMASPNGNADPTGTTTTAAAAAAGETDGKSSEGKEKSPIKRSKGSLGSLNMITGKNSTEHGKTSGASANGAISQSGESGSESSSEGSEANSQNDSHHKESGQEQDGEVRSSQNGVSRSPSQAKLNQTMAIMPMTSSGPVPAPTTNLNIGMDYWANTASSTPAIHGKATPTAAPGSMVPGEQWVQDERELKRQRRKQSNRESARRSRLRKQAECEELAQRAEVLKQENTSLRDEVNRIRKEYDELLSKNSSLKEKLEDKQHKTDEAGVDNKLQHSGDDSQKKGN

SEQ ID NO: 551 - protein, 359 aa, Arabidopsis thaliana
  misc_feature (1)..(205): Pfam name: MFMR Pfam desc: G-box binding protein MFMR
  misc_feature (291)..(354): Pfam name: bZIP_1 Pfam desc: bZIP transcription factor
  misc_feature (291)..(345): Pfam name: bZIP_2 Pfam desc: Basic region leucine zipper
  misc_feature: Bit score of 761.9 for HMM based on sequences of Figure 6
  misc_feature: Functional Homolog Of Ceres Clone ID no. 258841 at SEQ ID NO. 521
MGSSEMEKSGKEKEPKTTPPSTSSSAPATVVSQEPSSAVSAGVAVTQDWSGFQAYSPMPPHGYVASSPQPHPYMWGVQHMMPPYGTPPHPYVTMYPPGGMYAHPSLPPGSYPYSPYAMPSPNGMAEASGNTGSVIEGDGKPSDGKEKLPIKRSKGSLGSLNMIIGKNNEAGKNSGASANGACSKSAESGSDGSSDGSDANSQNDSGSRHNGKDGETASESGGSAHGPPRNGSNLPVNQTVAIMPVSATGVPGPPTNLNIGMDYWSGHGNVSGAVPGVVVDGSQSQPWLQDEREIKRQRRKQSNRESARRSRLRKQAECDELAQRAEVLNGENSSLRAEINKLKSQYEELLAENSSLKNK

SEQ ID NO: 552 - protein, 334 aa, Arabidopsis thaliana
  misc_feature (1)..(163): Pfam name: MFMR Pfam desc: G-box binding protein MFMR
  misc_feature (265)..(328): Pfam name: bZIP_1 Pfam desc: bZIP transcription factor
  misc_feature (265)..(319): Pfam name: bZIP_2 Pfam desc: Basic region leucine zipper
  misc_feature: Bit score of 670.2 for HMM based on sequences of Figure 6
  misc_feature: Functional Homolog Of Ceres Clone ID no. 258841 at SEQ ID NO. 521
MATPDWSGFQAYSPMPPPHGYVASSPQPHPYMWGVQHMMPPYGTPPHPYVAMYPPGGMYAHPSMPPGSYPYSPYAMPSPNGMTEVSGNTTGGTDGDAKQSEVKEKLPIKRSRGSLGSLNMITGKNNEPGKNSGASANGAYSKSGESASDGSSEGSDGNSQNDSGSGLDGKDAEAASENGGSANGPQNGSAGTPILPVSQTVPIMPMTAAGVPGPPTNLNIGMDYWGAPTSAGIPGMHGKVSTPVPGVVAPGSRDGGHSQPWLQDDRELKRQRRKQSNRESARRSRLRKQAECDELAQRAEVLNEENTNLRAEINKLKSQCEELTTENTSLKDQL

SEQ ID NO: 553 - protein, 327 aa, Zea mays
  misc_feature (1)..(171): Pfam name: MFMR Pfam desc: G-box binding protein MFMR
  misc_feature (256)..(319): Pfam name: bZIP_1 Pfam desc: bZIP transcription factor
  misc_feature (256)..(310): Pfam name: bZIP_2 Pfam desc: Basic region leucine zipper
  misc_feature: Bit score of 498.2 for HMM based on sequences of Figure 6
  misc_feature: Functional Homolog Of Ceres Clone ID no. 258841 at SEQ ID NO. 521
MGSNDPSTPSKASKASEQVLETVDQPPATTSSGTVSVYPEWPSFQAYQAIPPHGFFPPTVAANPQAHPYMWGAQPMVPPYGTPPPPYVMYPPGAVYAHPSTPPTMHPFSHYPMPTNGHAETPGTAPSAPEMNGKSEPGRTSAPSANGITSHSESGSESESEGSDANYENDSHSKDNDGKEDGNSQNSISYSASQGVLNQTMAMLPIQPGAMVGGVSSSTANLNIGVHYWEAPGSAAVSATHGKAPAGSARGDQWDERELKKQKRKQSNRESARRSRLRKQAECEELGQRAETLRSENSSLRAELERIRKEYEQLLSQNASLKEKLGG

SEQ ID NO: 554 - protein, 287 aa, Brassica napus
  misc_feature (1)..(155): Pfam name: MFMR Pfam desc: G-box binding protein MFMR
  misc_feature (218)..(281): Pfam name: bZIP_1 Pfam desc: bZIP transcription factor
  misc_feature (218)..(272): Pfam name: bZIP_2 Pfam desc: Basic region leucine zipper
  misc_feature: Bit score of 311.1 for HMM based on sequences of Figure 6
  misc_feature: Functional Homolog Of Ceres Clone ID no. 258841 at SEQ ID NO. 521
MGTSEEKTPSKPASSTQDIPPTPYPDWSNSMQAYYGGGGTPSPFFPSPVGSPSPHPYMWGAQHHMMPPYGTPVPYPAMYPPGAVYAHPVMPMPPSSAPTNETVKEQAPGKKSKGSLKSKGEGGEKAPSGSGNDGVSHSDESVTGGSSDENDENANHQEHGSVRKPSFGQMLADASSQSNTTGEMIQGSVPMKPLAPGTNLNMGMDLWSSQAGVPVKDERELKRQKRKQSNRESARRSRLRKQAECEQLQQRVESLTSENQSLRDELQRLSGECEKLKTQNSSIQDEL

SEQ ID NO: 555 - protein, 314 aa, Glycine max
  misc_feature (1)..(146): Pfam name: MFMR Pfam desc: G-box binding protein MFMR
  misc_feature (241)..(304): Pfam name: bZIP_1 Pfam desc: bZIP transcription factor
  misc_feature (241)..(295): Pfam name: bZIP_2 Pfam desc: Basic region leucine zipper
  misc_feature: Bit score of 526.4 for HMM based on sequences of Figure 6
  misc_feature: Functional Homolog Of Ceres Clone ID no. 258841 at SEQ ID NO. 521
MQYYGPRVNIPPYFNSAVASGHAPHPYMWGPPQPMMQPYGPPYAAFYSHGGVYTHPAVAIGPHSHGQGVPSSPAAGTPSSVESPTKFSGNTNQGLVKKLKGFDELAMSIGNCNAESAERGAENRLSQSVDTEGSSDGSDGNTAGANQTKRKRSREGTPITDAEGKTELQNGPASKETASSKKIVSATPASVAGTLVGPVVSSGMATALELRNPSTVHSKANSTSAAQPCAVVRNETWLQNERELKRERRKQSNRESARRSRLRKQAETEELARKVEMLTAENVSLKSEITRLTEGSEQMRMENSALREKLINTQ

SEQ ID NO: 556 - DNA, 1645 bp, Gossypium hirsutum
  misc_feature: Ceres Clone ID no. 1837464
  misc_feature: Encodes the peptide sequence at SEQ ID NO. 557
tcctctcaacttttgttcagtttttgagtaaagattaatgcagtctttttgactattttgttgaattattctttcgcagagtgaaagattttcggatttttcatattttcaagttgagagatagtcaaacacagttctcaaagttaagtttcagctttggtggttgaccatgggtagcagcgatgaaggaaagtcatctaaatctgacaaatcatcttcaccggcaccaccggaccagaccaatattcatgtctatcccgattgggcagccatgcaggcatattacggtcctcgtgttcctatgccaccatattataactcagctgtggcatctggccatgctccttccccctatatgtgggggccaacacaggctatcatgccaccttatgggacaacttatgcaacaatatacccacatgggggagtttatgtgcatcctacggttcctatgggatcacatggtcatggcgttccatcatcacctaaagcagctccagaaacacctacaaagttctctgggaatacaaacggaggcttaatgaagaagctgaaagggtttgatggccttgcaatgtcaataggcaatagtactgctgagaatgctgaaagtggggctgaacccagaccatctctgagtgcggagactgaaggttccactgatgatagtgatgggaatacaactggggcagatcaaacaagacggaaaagaagcagggagggaaccccagccattggtgtagaagggaataatgaggcaaggtctaaaccagtcgctgcactagaggctactgcaaccatttctcctaaaccagttggatccgtacttccttctggcatgaccacatctttggagcttagtaaccctcctgccaagtccagtcctacaaatgtacctcgtgtaatgacatctgaaatctggttgcagaacgaacgggagctgaaacgggagaggaggaaacagtctaacagagaatctgctcgaagatcaaggttgaggaagcaggccgaaaccgaagagcttgcccgaaaagttgaagccttgaccgcagaaaacacaacacttagatccgaaataaatcaactaaccgaaaaatccgagaaactaaggctagaaaatgctacattagtggagggattgaaaaacggtgaactaggatatgcaaaggatataattatgaacaagaaagcagacaaagagggtgaaatgtacgagaaaaagtcgaactccggtgccaaactgcatcaactctttgatccgagtccgagagctgatgctgtggctgcttcgtgaacaaggagaagaggtattacccattgccttagtcacttttgacattaaatttgacagacctcgtagctttggcatgtaattattactactaacaattagcagaggggacttgatagtgtttgttaggattgaagctctgtttttttttttttttgagttttcttatggctgaactgatttatggtttttatttgaaaatcagagtgatgagaaagctgagaatcaagtagtgtatattaaggagaaattagtgtttatcctttaggaaagggtcttggaaacagtggaattatgtaaatctcttatgattatgcaaatttttaatgacggtgtgatgtgtgatttgtcatt

SEQ ID NO: 557 - protein, 374 aa, Gossypium hirsutum
  misc_feature (1)..(175): Pfam name: MFMR Pfam desc: G-box binding protein MFMR
  misc_feature (255)..(318): Pfam name: bZIP_1 Pfam desc: bZIP transcription factor
  misc_feature (255)..(309): Pfam name: bZIP_2 Pfam desc: Basic region leucine zipper
  misc_feature: Ceres Clone ID no. 1837464
  misc_feature: Bit score of 538.3 for HMM based on sequences of Figure 6
  misc_feature: Functional Homolog Of Ceres Clone ID no. 258841 at SEQ ID NO. 521
MGSSDEGKSSKSDKSSSPAPPDQTNIHVYPDWAAMQAYYGPRVPMPPYYNSAVASGHAPSPYMWGPTQAIMPPYGTTYATIYPHGGVYVHPTVPMGSHGHGVPSSPKAAPETPTKFSGNTNGGLMKKLKGFDGLAMSIGNSTAENAESGAEPRPSLSAETEGSTDDSDGNTTGADQTRRKRSREGTPAIGVEGNNEARSKPVAALEATATISPKPVGSVLPSGMTTSLELSNPPAKSSPTNVPRVMTSEIWLQNERELKRERRKQSNRESARRSRLRKQAETEELARKVEALTAENTTLRSEINQLTEKSEKLRLENATLVEGLKNGELGYAKDIIMNKKADKEGEMYEKKSNSGAKLHQLFDPSPRADAVAAS

SEQ ID NO: 558 - DNA, 1789 bp, Gossypium hirsutum
  misc_feature: Ceres Clone ID no. 1884689
  misc_feature: Encodes the peptide sequence at SEQ ID NO. 559
aacgacacgtttttggtgatgtggatgttgccttcactttggcactccctctcttttttcttctcccacaccctcctcctcctcctcctgtatctctctcttattctccgcgaattttaaaagaaaagaattcccgatctttttcagcgaagaagataatgcagtctttttgactaatatttcttttcaaattctcttctgtacttctttttttcccttattgaagataatctaatattgatttgtattattattttccagccaagagaaggaagaatctcgggtttcagattttaagttgacagagagaggtgaaccaacttctataaaaggtttcacctttggtgctttgaccatgggaaacaacgatgaagggaagtcttctaagtctgacaaatcatcttcaccagtgccaacggcatattatggtcctcatgtcaatatgccaccatattacagttcagctgtggcatcaggccatgctcctcccgcctatatgtggggtctaacacagcctatgatgccaccctatggagcaccttatgcaacaatctactctcatgggggagtttttgcacatcccgcagttcctctggctgcaggtcctgtggagacacctgtgaagtcccccggaaatactgaacaaggtttaatgaagaagctgaaaggatttgatggtcttgcaatatcaataggcaatggtactgctaagaacgctgaaggaagagctaaacctagaccatcccatagtgtggagactgcaggttcaaccgatggtagtgatggaaatacaactgggacggatcaaagtagatggaaaagaagcagggaggggacaccaactcttgtcgaagatgagaaaattgaggcgaagtcttaccaagttgctgcgggagaggtgactgcaaccatttctcctaaaccaattggaactgtagtttctcctggcatgaccacaggaacaatattggagcttaggaacacccccaacaagaatgctatgtccagtgctatgggtgtacattgtggagtaatgcccactgaagtctggttgcagaatgagcgggagctgaaacgggagaggcgaaaacaatctaatagagaatccgctagaaggtcaaggctgaggaagcaggctgagactgaagagcttgcccgtaaagttgaatccttaacttcagagaatgcagcactcagatctgaaataaaccaattaactgaaatgtcagaaaaagtaaggctcgaaaatgcgatattagtggaggaactgaaaaacgctcaactcggacacggacaggagaatgttttgaacaaaaaggaagacaaggaggatgaaatgtgtgagaaaaagtcagactccggtgccaagctgcatcaactcttggatccgagtcctagagacgatgtagtggctgctggctgaatgaggagaagagttgtggcctagtgattttggtattaaattggaggaaatcaggtagctttggcataatttagaagcccaaggctactactgaaagttagcatagggatgaaatagttggttagggattgtgatggacggcactttttgcatttgtaagttaggttttgtaatagcagaagtgatgtaattttatttgaaaattagagtgaaagaggaagtcgtgtaggttaacgggaattggagtgtagcagaggatagtagaatagaaacctgtaatacgtaatctctaatgattattcaaaattttattgtcataaacatttgaaatttgaaaatgctacaaatcaccgttggttctctttc

SEQ ID NO: 559 - protein, 355 aa, Gossypium hirsutum
  misc_feature (1)..(150): Pfam name: MFMR Pfam desc: G-box binding protein MFMR
  misc_feature (236)..(299): Pfam name: bZIP_1 Pfam desc: bZIP transcription factor
  misc_feature (236)..(290): Pfam name: bZIP_2 Pfam desc: Basic region leucine zipper
  misc_feature: Ceres Clone ID no. 1884689
  misc_feature: Bit score of 470.7 for HMM based on sequences of Figure 6
  misc_feature: Functional Homolog Of Ceres Clone ID no. 258841 at SEQ ID NO. 521
MGNNDEGKSSKSDKSSSPVPTAYYGPHVNMPPYYSSAVASGHAPPAYMWGLTQPMMPPYGAPYATIYSHGGVFAHPAVPLAAGPVETPVKSPGNTEQGLMKKLKGFDGLAISIGNGTAKNAEGRAKPRPSHSVETAGSTDGSDGNTTGTDQSRWKRSREGTPTLVEDEKIEAKSYQVAAGEVTATISPKPIGTVVSPGMTTGTILELRNTPNKNAMSSAMGVHCGVMPTEVWLQNERELKRERRKQSNRESARRSRLRKQAETEELARKVESLTSENAALRSEINQLTEMSEKVRLENAILVEELKNAQLGHGQENVLNKKEDKEDEMCEKKSDSGAKLHQLLDPSPRDDVVAAG

SEQ ID NO: 560 - protein, 354 aa, Populus balsamifera subsp. trichocarpa
  misc_feature (1)..(169): Pfam name: MFMR Pfam desc: G-box binding protein MFMR
  misc_feature (255)..(318): Pfam name: bZIP_1 Pfam desc: bZIP transcription factor
  misc_feature (255)..(309): Pfam name: bZIP_2 Pfam desc: Basic region leucine zipper
  misc_feature: Public GI ID no. 118488723
  misc_feature: Bit score of 451.2 for HMM based on sequences of Figure 6
  misc_feature: Functional Homolog Of Ceres Clone ID no. 258841 at SEQ ID NO. 521
MGTGEESTPAKPSKPTSSNQEIPTTPLYPDWSSSMQAYYGAGATPPPFYASTVASPASHPYLWGSQHPLIPPYGTPVPYPALYPAGGVYAHPNMAPTPNSAQANIEMEGKVPNGKDRASAKKTKGTSGGKAGESGKAASGSGNDGASQSAESGSDGSSDASDENTNQQEYGASKKGSFNQMLADANAQSTSAGANIQASVPGKPVASMPATNLNIGMDLWNASSAAGATKMRPNPSCATSGVVPAGLPEQWIQDERELKRQKRKQSNRESARRSRLRKQAECEELQARVQNLSSDNSNLRNELQSLSEECNKLKSENDSIKEELTRLYGPEVVAKLEQSNPASVPESHGGEGDS

SEQ ID NO: 561 - DNA, 1149 bp, Populus balsamifera subsp. trichocarpa
  misc_feature: Ceres Annot ID no. 1487864
  misc_feature: Encodes the peptide sequence at SEQ ID NO. 562
atggggacaagggaagaaagcacacctgctaagccttccaaaccagcatcttcaaatcaggaaatacccgcaacgccttcatatcctgattggtcaaattctgtgcaggcttattatggtgctggagctaccccacctcccttttttgcctcaacagttgcctcaccgacgcctcatccctatatttggggaagccagcatcctttaatcccaccttatggaaccccggttccatacccagctttatatcctgcagggggagtgtatgcccatccaaacatggccccgacaccaaattcagcaccggcaaatacagagttggaaggaaaggtccctgacggaaaggaccatgcttcagctaaaaaagctaagggaacttcaggaggaaaagctggagagagtggaaaggctatttcagattcaggaaatgatggtgcctcccaaagtgctgaaagtggtacagatggctcatctgatgccagtgatgagaatactaaccagcaggaaaatgctgcaaacaagaaaggaagcttcaaccagatgcttgcagatggtgacatttctcatccttgtttctatctgttcttgtttgttttctgtaatagcttgctaaacaagatgactttcttcacagccaatgcacaaagtaactcagccggagcaaatatccagacttctgtgcctgggaagcctgtggggtctatgcctgcaactaatctaaacattgggatggacttgtggaatgcatctccagatgcttctggaactacaaaaatgagaccaaatccatccggtgcctcatccggtattgttcctgctggaatgcctgaacaatggattcaagatgaacgtgaattgaaaagacagaagaggaaacaatctaatagagagtcagccagaaggtcaaggttacgtaaacaggcagagtgtgaagagttacaagtcagggtagagaatttgagcaatgacaattgcaatcttagagatgaattgcagagcctctccgaagaatgcaacaagcttaaatccgaaaatgatttcattaaggaggagttgactcggttgtatggaccggaagcagtagctaaccttgaacaaaccaaccccgtttcagatccaaagtctcacggtggtgagggagacagttaa

SEQ ID NO: 562 - protein, 382 aa, Populus balsamifera subsp. trichocarpa
  misc_feature (1)..(169): Pfam name: MFMR Pfam desc: G-box binding protein MFMR
  misc_feature (283)..(346): Pfam name: bZIP_1 Pfam desc: bZIP transcription factor
  misc_feature (283)..(337): Pfam name: bZIP_2 Pfam desc: Basic region leucine zipper
  misc_feature: Ceres Annot ID no. 1487864
  misc_feature: Bit score of 471.6 for HMM based on sequences of Figure 6
  misc_feature: Functional Homolog Of Ceres Clone ID no. 258841 at SEQ ID NO. 521
MGTREESTPAKPSKPASSNQEIPATPSYPDWSNSVQAYYGAGATPPPFFASTVASPTPHPYIWGSQHPLIPPYGTPVPYPALYPAGGVYAHPNMAPTPNSAPANTELEGKVPDGKDHASAKKAKGTSGGKAGESGKAISDSGNDGASQSAESGTDGSSDASDENTNQQENAANKKGSFNQMLADGDISHPCFYLFLFVFCNSLLNKMTFFTANAQSNSAGANIQTSVPGKPVGSMPATNLNIGMDLWNASPDASGTTKMRPNPSGASSGIVPAGMPEQWIQDERELKRQKRKQSNRESARRSRLRKQAECEELQVRVENLSNDNCNLRDELQSLSEECNKLKSENDFIKEELTRLYGPEAVANLEQTNPVSDPKSHGGEGDS

SEQ ID NO: 563 - DNA, 978 bp, Populus balsamifera subsp. trichocarpa
  misc_feature: Ceres Annot ID no. 1541275
  misc_feature: Encodes the peptide sequence at SEQ ID NO. 564
atgtacagagattcacattctgacaagcataccaatccctcttcgttgtgtttacaggaaatacccgcaacgccttcatatcctgattggtcaaattctgtgcaggcttattatggtgctggagctaccccacctcccttttttgcctcaacagttgcctcaccgacgcctcatccctatatttggggaagccagcatcctttaatcccaccttatggaaccccggttccatacccagctttatatcctgcagggggagtgtatgcccatccaaacatggccccgacaccaaattcagcaccggcaaatacagagttggaaggaaaggtccctgacggaaaggaccatgcttcagctaaaaaagctaagggaacttcaggaggaaaagctggagagagtggaaaggctatttcagattcaggaaatgatggtgcctcccaaagtgctgaaagtggtacagatggctcatctgatgccagtgatgagaatactaaccagcagacttctgtgcctgggaagcctgtggggtctatgcctgcaactaatctaaacattgggatggacttgtggaatgcatctccagatgcttctggaactacaaaaatgagaccaaatccatccggtgcctcatccggtattgttcctgctggaatgcctgaacaatggattcaagatgaacgtgaattgaaaagacagaagaggaaacaatctaatagagagtcagccagaaggtcaaggttacgtaaacaggcagagtgtgaagagttacaagtcagggtagagaatttgagcaatgacaattgcaatcttagagatgaattgcagagcctctccgaagaatgcaacaagcttaaatccgaaaatgatttcattaaggaggagttgactcggttgtatggaccggaagcagtagctaaccttgaacaaaccaaccccgtttcagatccaaagtctcacggtggtgagggagacagttaa

SEQ ID NO: 564 - protein, 325 aa, Populus balsamifera subsp. trichocarpa
  misc_feature (4)..(168): Pfam name: MFMR Pfam desc: G-box binding protein MFMR
  misc_feature (226)..(289): Pfam name: bZIP_1 Pfam desc: bZIP transcription factor
  misc_feature (226)..(280): Pfam name: bZIP_2 Pfam desc: Basic region leucine zipper
  misc_feature: Ceres Annot ID no. 1541275
  misc_feature: Bit score of 394.3 for HMM based on sequences of Figure 6
  misc_feature: Functional Homolog Of Ceres Clone ID no. 258841 at SEQ ID NO. 521
MYRDSHSDKHTNPSSLCLQEIPATPSYPDWSNSVQAYYGAGATPPPFFASTVASPTPHPYIWGSQHPLIPPYGTPVPYPALYPAGGVYAHPNMAPTPNSAPANTELEGKVPDGKDHASAKKAKGTSGGKAGESGKAISDSGNDGASQSAESGTDGSSDASDENTNQQTSVPGKPVGSMPATNLNIGMDLWNASPDASGTTKMRPNPSGASSGIVPAGMPEQWIQDERELKRQKRKQSNRESARRSRLRKQAECEELQVRVENLSNDNCNLRDELQSLSEECNKLKSENDFIKEELTRLYGPEAVANLEQTNPVSDPKSHGGEGDS

SEQ ID NO: 565 - DNA, 1119 bp, Populus balsamifera subsp. trichocarpa
  misc_feature: Ceres Annot ID no. 1471259
  misc_feature: Encodes the peptide sequence at SEQ ID NO. 566
atgggaaacaatgaagagggaaagtcttctgcgtctgataaatcttctcctgcccaacaagatcagaccagcattcatgtatatcctgattgggcagctattcaggcatattatggatcccgagtggctctcccaccatattacaactcgggtgtggcatctggccatgccccccatccttatatgtggggcccgccgcagcctatgatggctacttatggggcaccatatgcagcaatctattcacatggaggagtgtatgcacatccggctgttccgattggatcccatccgcatggtcctggggttctgtcatctcctgctgctcatacccctttgagtgcagaaacacctacaaaatcttcaggaaatactgatcagggtttaatgaagaagttgaaagggtttgatgggcttgcaatgtcaataggcaatggtgatgctgagagtgcagagggtgggagtaggctacctcagagcatggagacagaaggttccagtgatggaagtgatgggaatacagctaggggaaagaaaaggagccgtgagggaacaccaactgttggtggagatacaaaaacagagacacattgtagccctcttcttggagaggtgaatccatccactgacaaggttttgggtgcagttgttgatcctggtatgaccaaagcattggagctcagaaaccctcctagtgtgaatgttgctaagacaaatcctgcaactattcctcaacctggtgccatgctgccttctgaagcctggtcaccgaatgaccgggagctgaaacgagagaggaggaagcaatcaaacagagaatctgctagaaggtcaagattaaggaagcaggccgaggctgaagaactcgcacacaaagtagaaacgttgactacagtgaacatgacactcaaatcagaaatagatcagtttacagagaaatcgcagaaactaaggcttgaaaatgcagcattaacggagaaactcaagaatgcgcaactaggacccacgcaagaaataattttaaacaacattgatgagcagcgaagctccaactctggtgccaagctacatcaactcatggatgcaagccccagagctgatgctgtggctgctggctga

SEQ ID NO: 566 - protein, 372 aa, Populus balsamifera subsp. trichocarpa
  misc_feature (1)..(178): Pfam name: MFMR Pfam desc: G-box binding protein MFMR
  misc_feature (259)..(322): Pfam name: bZIP_1 Pfam desc: bZIP transcription factor
  misc_feature (259)..(313): Pfam name: bZIP_2 Pfam desc: Basic region leucine zipper
  misc_feature: Ceres Annot ID no. 1471259
  misc_feature: Bit score of 550.0 for HMM based on sequences of Figure 6
  misc_feature: Functional Homolog Of Ceres Clone ID no. 258841 at SEQ ID NO. 521
MGNNEEGKSSASDKSSPAQQDQTSIHVYPDWAAIQAYYGSRVALPPYYNSGVASGHAPHPYMWGPPQPMMATYGAPYAAIYSHGGVYAHPAVPIGSHPHGPGVLSSPAAHTPLSAETPTKSSGNTDQGLMKKLKGFDGLAMSIGNGDAESAEGGSRLPQSMETEGSSDGSDGNTARGKKRSREGTPTVGGDTKTETHCSPLLGEVNPSTDKVLGAVVDPGMTKALELRNPPSVNVAKTNPATIPQPGAMLPSEAWSPNDRELKRERRKQSNRESARRSRLRKQAEAEELAHKVETLTTVNMTLKSEIDQFTEKSQKLRLENAALTEKLKNAQLGPTQEIILNNIDEQRSSNSGAKLHQLMDASPRADAVAAG

SEQ ID NO: 567 - DNA, 1317 bp, Populus balsamifera subsp. trichocarpa
  misc_feature: Ceres Annot ID no. 1444364
  misc_feature: Encodes the peptide sequence at SEQ ID NO. 568
atgggaaacattgaagagggaaagtcttccacttctgataaatcttcacctgcaccaccggatcagaccaatattcatgtgtatcctgatggggcagctatgcaggcatattatggcccccgagtggctctcccaccatattacaactcggccgtggcttctggtcatgcccctcatccttatatgtggggcctgccacagcctatgatgccaccttatggggcaccttatgcaacagtctactcacatggagtgtatgcacatccggctgttccaattgtatcccatcctcatggtcctgggattgtgtcatctcctgcagctggaacccttttgagtgcagaaacacctacaaaatcttcaggaaatactgatcgaggtttagtgaataagttgaaaggatttgatgggcttgcaatgtcaataggcaatggtaatgctgagactgtcgagggtgggggtaggctgtctcaaagtgtggagatagaagtttccagtgatggaattgatgggaatacaactaggggaaagaaaaggagccgtgagggaacaccaactgttggtatgatctcattcttcattgagagtgttgaccctagacactcaatttccagtagtatttgttcttttcctgttgtatgcatgacatccaaccacgttgcaacttgtgaaatgacaacaacaggtggagatacaaaaatggagtcacattccagtccccttcctagagaggtgaatgcatccactgacaatgtattgagggcagctgttgctcctggcatgaccacagcattggagcttaggaaccctcctagtgtgaatgctgctaagacaagtcctactacaattcctcaatctggtgtagtcctgccctctgaagcctggttacagaatgagctggagctgaaacgggagaagaggaaacaatcaaatcgagaatctgccagaaggtcaagattaaggaagcaggctgaggctgaagaacttgcacacaaagttgaagtactcaccacagaaaacatggcactccaatctgaaataagtcaatttacagagaaatcagagaaactaaggcttgaaaatgctgcattaacggagaaactcaagaatgcacgattaggacatgcgcaagaaatgattttaaacattgatgagcacagggccccagctgttagtacagaaaacttgctatcaagagttaacaattctgcctttgaagaagagcgtgatctgtatgaacgaaactcaaattctggtgccaagctgcatcaactcttggatgcaagccccagagccgatgctgtggctgctggttga

SEQ ID NO: 568 - protein, 438 aa, Populus balsamifera subsp. trichocarpa
  misc_feature (1)..(177): Pfam name: MFMR Pfam desc: G-box binding protein MFMR
  misc_feature (299)..(362): Pfam name: bZIP_1 Pfam desc: bZIP transcription factor
  misc_feature (299)..(353): Pfam name: bZIP_2 Pfam desc: Basic region leucine zipper
  misc_feature: Ceres Annot ID no. 1444364
  misc_feature: Bit score of 573.7 for HMM based on sequences of Figure 6
  misc_feature: Functional Homolog Of Ceres Clone ID no. 258841 at SEQ ID NO. 521
MGNIEEGKSSTSDKSSPAPPDQTNIHVYPDGAAMQAYYGPRVALPPYYNSAVASGHAPHPYMWGLPQPMMPPYGAPYATVYSHGVYAHPAVPIVSHPHGPGIVSSPAAGTLLSAETPTKSSGNTDRGLVNKLKGFDGLAMSIGNGNAETVEGGGRLSQSVEIEVSSDGIDGNTTRGKKRSREGTPTVGMISFFIESVDPRHSISSSICSFPVVCMTSNHVATCEMTTTGGDTKMESHSSPLPREVNASTDNVLRAAVAPGMTTALELRNPPSVNAAKTSPTTIPQSGVVLPSEAWLQNELELKREKRKQSNRESARRSRLRKQAEAEELAHKVEVLTTENMALQSEISQFTEKSEKLRLENAALTEKLKNARLGHAQEMILNIDEHRAPAVSTENLLSRVNNSAFEEERDLYERNSNSGAKLHQLLDASPRADAVAAG

SEQ ID NO: 569 - protein, 368 aa, Arabidopsis thaliana
  misc_feature (1)..(198): Pfam name: MFMR Pfam desc: G-box binding protein MFMR
  misc_feature (298)..(361): Pfam name: bZIP_1 Pfam desc: bZIP transcription factor
  misc_feature (298)..(352): Pfam name: bZIP_2 Pfam desc: Basic region leucine zipper
  misc_feature: Public GI ID no. 3608135
  misc_feature: Bit score of 700.1 for HMM based on sequences of Figure 6
  misc_feature: Functional Homolog Of Ceres Clone ID no. 258841 at SEQ ID NO. 521
MASNEMEKSSKEKEPKTPPPSSTAPPSSQEPSSAVSAGMATPDWSGFQAYSPMPPPHGYVASSPQPHPYMWGVQHMMPPYGTPPHPYVAMYPPGGMYAHPSMPPGSYPYSPYAMPSPNGMTEVSVSGTDGDAKQSEVKEKLPIKRSRGSLGSLNMITGKNNEPGKNSGASANGAYSKSGESASDGSSEGSDGNSQNSSLLFFHSAEAASENGGSANGPQNGSAGTPILPVSQTVPIMPMTAAGVPGPPTNLNIGMDYWGAPTSAGIPGMHGKVSTPVPGVVAPGSRDGGHSQPWLQDDRELKRQRRKQSNRESARRSRLRKQAECDELAQRAEVLNEENTNLRAEINKLKSQCEELTTENTSLKVKKK

SEQ ID NO: 570 - protein, 359 aa, Arabidopsis thaliana
  misc_feature (1)..(182): Pfam name: MFMR Pfam desc: G-box binding protein MFMR
  misc_feature (234)..(297): Pfam name: bZIP_1 Pfam desc: bZIP transcription factor
  misc_feature (234)..(288): Pfam name: bZIP_2 Pfam desc: Basic region leucine zipper
  misc_feature: Public GI ID no. 30690290
  misc_feature: Bit score of 393.7 for HMM based on sequences of Figure 6
  misc_feature: Functional Homolog Of Ceres Clone ID no. 258841 at SEQ ID NO. 521
MGNSSEEPKPPTKSDKPSSPPVDQTNVHVYPDWAAMQAYYGPRVAMPPYYNSAMAASGHPPPPYMWNPQHMMSPYGAPYAAVYPHGGGVYAHPGIPMGSLPQGQKDPPLTTPGTLLSIDTPTKSTGNTDNGLMKKLKEFDGLAMSLGNGNPENGADEHKRSRNSSETDGSTDGSDGNTTGADEPKLKRSREGTPTKDGKQLVQASSFHSVSPSSGDTGVKLIQGSGAILSPGNERELKRERRKQSNRESARRSRLRKQAETEELARKVEALTAENMALRSELNQLNEKSDKLRGANATLLDKLKCSEPEKRVPANMLSRVKNSGAGDKNKNQGDNDSNSTSKLHQLLDTKPRAKAVAAG

SEQ ID NO: 571 - protein, 376 aa, Brassica napus
  misc_feature (1)..(177): Pfam name: MFMR Pfam desc: G-box binding protein MFMR
  misc_feature (258)..(321): Pfam name: bZIP_1 Pfam desc: bZIP transcription factor
  misc_feature (258)..(312): Pfam name: bZIP_2 Pfam desc: Basic region leucine zipper
  misc_feature: Public GI ID no. 1399005
  misc_feature: Bit score of 415.9 for HMM based on sequences of Figure 6
  misc_feature: Functional Homolog Of Ceres Clone ID no. 258841 at SEQ ID NO. 521
MGKSEEPKVTKSDNKPSSPPADQTNVHVYPDWAAMQAYYGPRVAMPPYYNSAMAAASGHPPPPYMWNPQHMMSPYGTPYAAVYPHGGGVYAHPGFPMPQGQKGATPLTTPGTPLNIDTPSKSTGNTENGLMKKLKEFDGLAMSLGNGNNGDEGKRSRNSSETDGSSDGSDGNTTGADEPKLKRSREGTPAKDEKKHLVQSSSFRSVSQSSGDNNCVKPSVQGGGGAIVSAAGVSANSNPTFMSQSLAMVPPETWLQNERELKRERRKQSNRESARRSRLRKQAETEELARKVEALTAENMALRSELNQLNEKSNNLRGANATLLDKLKSSEPEKRVKSSGNGDDKNKKQGDNETNSTSKLHQLLDTKPRADGVAAR

SEQ ID NO: 572 - protein, 338 aa, Glycine max
  misc_feature (1)..(172): Pfam name: MFMR Pfam desc: G-box binding protein MFMR
  misc_feature (256)..(319): Pfam name: bZIP_1 Pfam desc: bZIP transcription factor
  misc_feature (256)..(310): Pfam name: bZIP_2 Pfam desc: Basic region leucine zipper
  misc_feature: Public GI ID no. 113367212
  misc_feature: Bit score of 409.6 for HMM based on sequences of Figure 6
  misc_feature: Functional Homolog Of Ceres Clone ID no. 258841 at SEQ ID NO. 521
MGAGEESTAKSSKSSSSAQQDTPTAPAYPDWSSSMQAYYAPGATPPPFFATTVASPTPHPYLWGGQHPLMPPYGTPVPYPAIYPPGSIYAHPSMAVTPSAVQQNTEIEGKGAEGKYRDSSKKLKGPSANTASKAGESGKAGSGSGNDGISQSGESGSEGSSNASDENTNQQESAANKKGSFDLMLVDGANAQNNSAGAISQSSVPGKPVVPMPATNLNIGMDLWNASSGGAEAAKMRHNQSGAPGVALGDQWVQDERELKRQKRKQSNRESARRSRLRKQAECEELQKRVESLGGENQTLREELQRLSEECEKLTSENNSIKEELERLCGPEAVANLD

SEQ ID NO: 573 - protein, 391 aa, Glycine max
  misc_feature (1)..(182): Pfam name: MFMR Pfam desc: G-box binding protein MFMR
  misc_feature (246)..(309): Pfam name: bZIP_1 Pfam desc: bZIP transcription factor
  misc_feature (246)..(300): Pfam name: bZIP_2 Pfam desc: Basic region leucine zipper
  misc_feature: Public GI ID no. 113367192
  misc_feature: Bit score of 618.0 for HMM based on sequences of Figure 6
  misc_feature: Functional Homolog Of Ceres Clone ID no. 258841 at SEQ ID NO. 521
MGNSEEEKSTKTEKPSSPVTVDQANQTNQTNIHVYPDWAAMQAYYGPRVTMPPYYNSAVASGHAPHPYMWGPPQPMMPPYGPPYAAIYPHGGVYTHPAVPIEPHTHSQGVPSSPAAGTPLSIETPPKSSGNTDQGLMKKLKSLMDLQCQLAMAMLKVQSVEVKTGSHRDGEGKTEIQGSPISKETAASNKMLGVVPASVAGTIVGHVVSSGMTTALELRNPSSVHSKTSAPQPCPVLPAEAWVQNERELKRERRKQSNRESARRSRLRKQAETEELARKVESLNAENATLKSEINRLTESSEKMRVENATLRGKLKNAQLGQTQEITLKIIDSQRATPVSTENLLSRVNNSGSNDRTVEDENGFCENKPNSGAKLHQLLDTSPRADAVAAG

SEQ ID NO: 574 - protein, 339 aa, Phaseolus vulgaris
  misc_feature (1)..(173): Pfam name: MFMR Pfam desc: G-box binding protein MFMR
  misc_feature (257)..(320): Pfam name: bZIP_1 Pfam desc: bZIP transcription factor
  misc_feature (257)..(311): Pfam name: bZIP_2 Pfam desc: Basic region leucine zipper
  misc_feature: Public GI ID no. 1354857
  misc_feature: Bit score of 405.9 for HMM based on sequences of Figure 6
  misc_feature: Functional Homolog Of Ceres Clone ID no. 258841 at SEQ ID NO. 521
MGAGEESTTKSSKSSSSVQETPTVPAYPDWSSSMQAYYAPGAAPPPFFASTVASPTPHPYLWGSQHPLMPPYGTPVPYPALYPPGSIYAHHPSMAVTPSVVQQSTEIEGKGTDGKDRDSSKKLKGTSANAGSKAGESGKAGSGSGNDGMSQSGESGSEGSSNASDENNNQQESATNKKGSFDLMLVDGANAQNNSGGAISQSSMPGKPVVSMPATNLNIGMDLWNASSGGGEAAKMRHNQSGAPGVVALGEQWIQDERELKRQKRKQSNRESARRSRLRKQAECEDLQKRVETLGSENRTLREELQRLSEECEKLTSENSSIKEELERMCGPEAVANLG

SEQ ID NO: 575 - protein, 424 aa, Phaseolus vulgaris
  misc_feature (1)..(184): Pfam name: MFMR Pfam desc: G-box binding protein MFMR
  misc_feature (279)..(342): Pfam name: bZIP_1 Pfam desc: bZIP transcription factor
  misc_feature (279)..(333): Pfam name: bZIP_2 Pfam desc: Basic region leucine zipper
  misc_feature: Public GI ID no. 1155054
  misc_feature: Bit score of 811.3 for HMM based on sequences of Figure 6
  misc_feature: Functional Homolog Of Ceres Clone ID no. 258841 at SEQ ID NO. 521
MGNSEEGKSVKTGSPSSPATTTNQTNQPNFHVYPDWAAMQYYGPRVNIPPYFNSAVASGHAPHPYMWGPPQPMMPPYGPPYAAFYSPGGVYTHPAVAIGPHSHGQGVPSPPAAGTPSSVDSPTKLSGNTDQGLMKKLKGFDGLAMSIGNCNAESAELGAENRLSQSVDTEGSSDGSDGNTAGANQTKMKRSREETSTTDGEGKTETQDGPVSKETTSSKMVMSATPASVAGKLVGPVISSGMTTALELRKPLTVHSKENPTSAPQPCAAVPPEAWLQNERELKRERRKQSNRESARRSRLRKQAETEELARKVEMLTAENVSLKSEITQLTEGSEQMRMENSALREKLRNTQLGQREEIILDSIDSKRSTPVSTENLLSRVNNSSSNDRSAENESDFCENKPNSGAKLHQLLDTNPRADAVAAG

SEQ ID NO: 576 - protein, 352 aa, Petroselinum crispum
  misc_feature (1)..(173): Pfam name: MFMR Pfam desc: G-box binding protein MFMR
  misc_feature (260)..(323): Pfam name: bZIP_1 Pfam desc: bZIP transcription factor
  misc_feature (260)..(314): Pfam name: bZIP_2 Pfam desc: Basic region leucine zipper
  misc_feature: Public GI ID no. 9650824
  misc_feature: Bit score of 399.5 for HMM based on sequences of Figure 6
  misc_feature: Functional Homolog Of Ceres Clone ID no. 258841 at SEQ ID NO. 521
MGAGEENTPSKHSKPTAPVQEVQTPPSYPDWSSSMQAYYGAGAAPAFYASTVAPPTPHPYMWGGQHPLMPPYGTPIPYPVYPPGGMYAHPSIATNPSIVPTAESEGKAVDGKDRNSTKKSKGASGNGSSGGGKTGDSGKAASSSGNEGGTQSAESGSDGSSDGGSDENTNHEFSTGKKGSFHQMLADGASAQNSVAGSVPGNPVVSVPAANLNIGMDLWNASPAGNGSLKVRQNPSAAVAPGTMIVRDGMMPEQWVNQDERELKRQKRKQSNRESARRSRLRKQAECEELQGRVETLNNENRSLRDELKRLSEECEKVTSENNTIKEELIRVYGPEEVSKLGIQSFDDGGDS

SEQ ID NO: 577 - protein, 411 aa, Petroselinum crispum
  misc_feature (1)..(170): Pfam name: MFMR Pfam desc: G-box binding protein MFMR
  misc_feature (267)..(330): Pfam name: bZIP_1 Pfam desc: bZIP transcription factor
  misc_feature (267)..(321): Pfam name: bZIP_2 Pfam desc: Basic region leucine zipper
  misc_feature: Public GI ID no. 1169081
  misc_feature: Bit score of 533.3 for HMM based on sequences of Figure 6
  misc_feature: Functional Homolog Of Ceres Clone ID no. 258841 at SEQ ID NO. 521
MGNTDDVKAVKPEKLSSPPPPAAPDQSNSHVYPDWAAMQAYYGPRVALPPYFNPAVASGQSPHPYMWGPPQPVMPPYGVPYAALYAHGGVYAHPGVPLAASPMSMDTHAKSSGTNEHGLIKKLKGHDDLAMSIGNGKADSSEGEMERTLSQSKETEGSSDGSNENSKRAAVNGRKRGRDEAPNMIGEVKIETQSSVIPSPRAKSEKLLGITVATPMVAGKVVGTVVSPSMTSSLELKDSPKEHAVNSPAGGQQPSTMMPNDSWLHNDRDLKRERRKQSNRESARRSRLRKQAEAEELAIKVDSLTAENMALKAEINRLTLTAEKLTNDNSRLLEVMKNAQAERAADVGLGNNNEKKASTLSTANLLSRVDNAGSGDRDEGESDVYEKTTKSGAKLHQLLDANPRTDAVAAG

SEQ ID NO: 578 - protein, 427 aa, Nicotiana tabacum
  misc_feature (1)..(186): Pfam name: MFMR Pfam desc: G-box binding protein MFMR
  misc_feature (284)..(347): Pfam name: bZIP_1 Pfam desc: bZIP transcription factor
  misc_feature (284)..(338): Pfam name: bZIP_2 Pfam desc: Basic region leucine zipper
  misc_feature: Public GI ID no. 728628
  misc_feature: Bit score of 632.0 for HMM based on sequences of Figure 6
  misc_feature: Functional Homolog Of Ceres Clone ID no. 258841 at SEQ ID NO. 521
MGNSEDGKSCKPEKSSSTAPDQSNIHVYPDWAAMQAYYGPRVAVPPYVNSPVAPGQAPHPCMWGPLQPMMPPYGIPYAGIYAHGGVYAHPGVPIVSRPQAHVMTSSPAVSQTMDAASLSMDPSAKTSGDTNQGLMSKLKGSDGLGMSIGNCSVDNGDGTDHGPSQSDSGQTEGSSDGSNIHTAEVGEKSKKRSRETTPNTSGDGKSRTRSSPQPREVNGATKKETSIAFNPGNIAEKVVGTVFSPTMTTTLELRNPVGTLVKASPTNVSRISPAVPGEAWLQNEREMKREKRKQSNRESARRSRLRKQGEAEELAIRVQSLTSENLGLKSEINNFTENSAKLKLENSALMERLQNKQRGQAEEVTLGKIGDKRLQPVSTADLLARVNNSGPLDRTNKDDEIHENNTSGAKLHQLLDASHRTDAVAAR

SEQ ID NO: 579 - DNA, 1053 bp, Sorghum bicolor
  misc_feature: Ceres Annot ID no. 6007883
  misc_feature: Encodes the peptide sequence at SEQ ID NO. 580
atggggagcaatgaccctagcacaccctccaaggcttcaaaggcatcagaacaagatcaacctccagctaccacatccagtggaacaccttcagtgtaccctgaatggcccagctttcaggcctactcagcaattccaccacatgggttcttcccccctaccgttgctgcaaatccacaggcccatccatacatgtggggagctcagcccatggtaccaccttatgggacgccaccaccaccttatgtgatgtatccacctggaacagtatatgcccatccctctacacctcctactatgcatccatttagtcattatcctatgccaacaaacggacatgctgaaacccctggagctgcaccaagtgctccagaaatgaatgggaaaagtgagcctggcagaacatctgctccatctgccaatgggattacctcccacagtgagagtggaagtgagagtgagagtgaaggaagtgatgccaattctcaaaatgattcacactcaaaggacaatgatggaaaggaagatggcaattctcagaatggcatatcttattcagcatcacaaggaatgttaaaccaaaccatggcgatgcttccagtacaaccgggtgcaatggttggaggagttcctagctccacagctaacttgaatattggaatggattattgggcagcttcaggttctgcagctgtccctggaacgcatggcaaagcaccagttggttcagctcggggagaccaatgggatgaaagggaactcaagaagcaaaaacgaaagcagtctaatagagaatcagcacgcagatcccggctgcgcaaacaggctgagtgcgaggagcttgggcaacgtgctgaagctttgaggtcggagaactcctctctcagggccgagcttgagcggatcagaaaggagtatgaacagctactttcacagaatgcttccctcaaggaaaagctgggggccaccagtgattctattcctgatatgaatgaaaagaacgacggcgacggcagctacaagagacaacatgattccgatgcccagtcttga

SEQ ID NO: 580 - protein, 350 aa, Sorghum bicolor
  misc_feature (1)..(166): Pfam name: MFMR Pfam desc: G-box binding protein MFMR
  misc_feature (251)..(314): Pfam name: bZIP_1 Pfam desc: bZIP transcription factor
  misc_feature (251)..(305): Pfam name: bZIP_2 Pfam desc: Basic region leucine zipper
  misc_feature: Ceres Annot ID no. 6007883
  misc_feature: Bit score of 585.0 for HMM based on sequences of Figure 6
  misc_feature: Functional Homolog Of Ceres Clone ID no. 258841 at SEQ ID NO. 521
MGSNDPSTPSKASKASEQDQPPATTSSGTPSVYPEWPSFQAYSAIPPHGFFPPTVAANPQAHPYMWGAQPMVPPYGTPPPPYVMYPPGTVYAHPSTPPTMHPFSHYPMPTNGHAETPGAAPSAPEMNGKSEPGRTSAPSANGITSHSESGSESESEGSDANSQNDSHSKDNDGKEDGNSQNGISYSASQGMLNQTMAMLPVQPGAMVGGVPSSTANLNIGMDYWAASGSAAVPGTHGKAPVGSARGDQWDERELKKQKRKQSNRESARRSRLRKQAECEELGQRAEALRSENSSLRAELERIRKEYEQLLSQNASLKEKLGATSDSIPDMNEKNDGDGSYKRQHDSDAQS

SEQ ID NO: 581 - DNA, 1149 bp, Sorghum bicolor
  misc_feature: Ceres Annot ID no. 6109033
  misc_feature: Encodes the peptide sequence at SEQ ID NO. 582
atgggaaagggagatgtggctactaggtccaaatctcaaaaatcgtcagcaatacagaatgagcagagtacacctactaacccccccacagcatatcctgattggtctcagttccaggcatactataatgctcctgggacagctcccgtgaccccaccggctttttttcattcatctgtagctccaagccctcagggacacccatatatgtggggtccacagatgatgcctccttatgggacaccaccaccatatgcagcaatgtatgcacaaggcacaccatatcagcaggcaccgatgccaccgggttcacacccatacagcccttatcctatgcagtcaccaaatgggacagttcaaactccaacatctggtgctggcggtacagagacaaataaatcgaataaaaataagcggaagactcccctgaaaagatcaaaaggaagcttaggtagtctggatgttgttgcagtaaaaaacaacaagtcaccggcaaagcctcaagcttcttcctccaatgaaggttcttcacaaagtgagagtggaagcgggagttcttctgaaggaagcagtacaaattcaaaaagtagttcaagggcgaaggatggttctgagcaaggtcagggtaatgatgctaggagtaaaggtactcaaagctctgcagttgagcccacacaaccatcttctgggcctgttgtgcttaaccctatgatgccattttggcctgttccccctcctatggctggcccagcaactactctgaatatgggagtggattactggggtactcctgcttctgtacccatgcatggtaaagttattgcagcaccgacatcagctccttcatcaaattcacgtgatattgttctcagtgatccggctatacaggatgagagagaaatgaagagacaaaaacggaagcaatcaaatagggaatcagctcggcgctcaagattgcgcaagcaggctgaatgggaggaagtagccaatcgtgcagatttgctaaagcaggaaaatagttcgcttaaagaagaattgaaacaacttcaggagaagtgtgatagcttgacctcagaaaatacatctctacacgagaagcttaaagtgcttgaggatgagaaatcaaatggaaattggtgcaaggattaa

SEQ ID NO: 582 - protein, 382 aa, Sorghum bicolor
  misc_feature (1)..(198): Pfam name: MFMR Pfam desc: G-box binding protein MFMR
  misc_feature (298)..(361): Pfam name: bZIP_1 Pfam desc: bZIP transcription factor
  misc_feature (298)..(352): Pfam name: bZIP_2 Pfam desc: Basic region leucine zipper
  misc_feature: Ceres Annot ID no. 6109033
  misc_feature: Bit score of 396.1 for HMM based on sequences of Figure 6
  misc_feature: Functional Homolog Of Ceres Clone ID no. 258841 at SEQ ID NO. 521
MGKGDVATRSKSQKSSAIQNEQSTPTNPPTAYPDWSQFQAYYNAPGTAPVTPPAFFHSSVAPSPQGHPYMWGPQMMPPYGTPPPYAAMYAQGTPYQQAPMPPGSHPYSPYPMQSPNGTVQTPTSGAGGTETNKSNKNKRKTPLKRSKGSLGSLDVVAVKNNKSPAKPQASSSNEGSSQSESGSGSSSEGSSTNSKSSSRAKDGSEQGQGNDARSKGTQSSAVEPTQPSSGPVVLNPMMPFWPVPPPMAGPATTLNMGVDYWGTPASVPMHGKVIAAPTSAPSSNSRDIVLSDPAIQDEREMKRQKRKQSNRESARRSRLRKQAEWEEVANRADLLKQENSSLKEELKQLQEKCDSLTSENTSLHEKLKVLEDEKSNGNWCKD

SEQ ID NO: 583 - DNA, 1710 bp, Zea mays
  misc_feature: Ceres Clone ID no. 645403
  misc_feature: Encodes the peptide sequence at SEQ ID NO. 584
actcgcgtcgcacggatctctccttccctccaggctccagctccaaagcctcgtcgccttcttcgccccgccacccgtcctgcacactcacaactagacatcgtaccacccaggttttgctttatgctggttcatttgtctacggacaatggactagttgctgcactgtttctgtgattcaccatgggaagcagtggagcagatacaccgtctaaggagcagcagccacctgctacctcaggtgctgaaataccacctgtttatccagattggtctagcttccaggcatatcccccaatcccaccacatggattcttcccctcacctgtggcatcaagtccacagggtcatcctttcatgtggggagctcaagatagttgggccatccacctaaagctcaaggaacttgatcctctcaaggggcttggtgagcaggctatgattccaccttatggaacaccgccaccatatgtcatgtacccccctggagtatatgcccacccatctatgcccccgggtgcacatccatttactccttatgccattacttctccaaatggcaatgctgatgctactggaactactgctgcagctggtaatactgatggcaagccctctgaaggcaaagataaaagtccaacaaagcgatccaaaggaagtttgggcagcttgaacatgcttactggaaagaatcccagtgaacatggtaagtcctcaggtgcatcgggtaatggagtcacttctcaaagtggcgaaagtggcagtgacagttcaagcgaagggagtgaaggaaattctcacaatgattcacatcacaaggaaagtggacaggaacacgatggggatgttcgaagttcccggaatggtgtatcacgtttgcaatctgagggaaaattgaaccaagctatggcaatcttgcccataccatcaagtggcccagcaactgatccaactacaaacctaaatattgggatggactattgggccaacacagcaagctctgctcctgcaattcatggcaaagcgacgtcaacaacagttccaggggctgtggtcccagcagagcagtggacacaggatgaacatgaactcaaaaagcaaagaagaaagcagtccaatagggagtctgcacgtagatctaggttacgtaaacaggctgaatgtgaggaattggctcaacgtgctgatgttttaaagcaggaaaatgcttcacttagagatgaagtaaaccgtatcagaaaagagtacgaggaacttctatcaaggaataactcactaaaggaaaaacttgaaggcaaacaacacaaaactgatgaggctggacttaacaacaagctgcaacattctgctgatgacagccagaaaaaaggaaactaatgctatcatgcaatgcttgcctacattggtcctaactagattattgggaggtgcaattgtagtatgcacattaactccttactttattgcagttaattgttaccaggttgtgataatgttgatgccaaccttttgtgtgggtgtttcctgtttcagatctatcttggcttatcttttagaagccaagatgtgactgaagctataggctgtgacccaattcactatatctgttagaaatagtggataaagtcaaacttacaaatttgaagtgctgactaatattgttatgtatacctggcaaaagactggttttcttttaattcagtctggttg

SEQ ID NO: 584 - protein, 397 aa, Zea mays
  misc_feature (1)..(209): Pfam name: MFMR Pfam desc: G-box binding protein MFMR
  misc_feature (300)..(363): Pfam name: bZIP_1 Pfam desc: bZIP transcription factor
  misc_feature (300)..(354): Pfam name: bZIP_2 Pfam desc: Basic region leucine zipper
  misc_feature: Ceres Clone ID no. 645403
  misc_feature: Bit score of 824.7 for HMM based on sequences of Figure 6
  misc_feature: Functional Homolog Of Ceres Clone ID no. 258841 at SEQ ID NO. 521
MGSSGADTPSKEQQPPATSGAEIPPVYPDWSSFQAYPPIPPHGFFPSPVASSPQGHPFMWGAQDSWAIHLKLKELDPLKGLGEQAMIPPYGTPPPYVMYPPGVYAHPSMPPGAHPFTPYAITSPNGNADATGTTAAAGNTDGKPSEGKDKSPTKRSKGSLGSLNMLTGKNPSEHGKSSGASGNGVTSQSGESGSDSSSEGSEGNSHNDSHHKESGQEHDGDVRSSRNGVSRLQSEGKLNQAMAILPIPSSGPATDPTTNLNIGMDYWANTASSAPAIHGKATSTTVPGAVVPAEQWTQDEHELKKQRRKQSNRESARRSRLRKQAECEELAQRADVLKQENASLRDEVNRIRKEYEELLSRNNSLKEKLEGKQHKTDEAGLNNKLQHSADDSQKKGN

SEQ ID NO: 585 - DNA, 1753 bp, Arabidopsis thaliana
  misc_feature: Ceres Clone ID no. 1221348
  misc_feature: Encodes the peptide sequence at SEQ ID NO. 586
ttcttctccgtcagataacaaaaaacaaatcaagcaaatttatttatcttggtcaagagacattgattctcttaaatttctgcaaaattaagctcagagattcacaccgcatctgaaattgtgctcagaggggttccaaatattaccagtcgttaggaagcaatcacgagttgttttaggaattagtgaacgtgataatggctagcaatgagatggaaaaatcgagtaaagagaaggaacctaaaacacctcctccttcttctactgcccctccctcttcacaggaaccttcatcggctgtgagtgctggcatggctactccagattggtctggttttcaggcatattctcctatgccgccgcctcatggttatgtggcatctagtccccaacctcacccttatatgtggggagttcagcatatgatgcctccttatggaactccgcctcatccttatgttgcaatgtatcccccaggtggcatgtacgcacatccttcaatgcctccgggttcttatccctatagcccttatgctatgccttctccaaatggaatgactgaagtttctggcaatactacaggcggcactgatggtgatgctaaacaatctgaagtgaaggaaaaattgcccatcaaaagatcaagaggaagcttaggaagtttgaacatgattacaggaaagaacaatgaacctgggaaaaactcaggagcatcagctaatggagcttactccaaaagtggggagagtgcttctgatggttcaagtgaaggaagtgatgggaactctcaaaatgattcgggatctggactagatggaaaggatgctgaagcagcatcagagaatggtggttctgccaatggtccgcaaaatggaagtgctggtacacctattctaccggtgagccagaccgtaccaatcatgccaatgacagctgcaggtgttcctggcccaccaacaaatttaaatattgggatggattactggggtgctccaacttcagctggtatccctggaatgcatgggaaagtatctacaccagttcctggagttgttgctccaggctcgcgagatggtggccattcacaaccctggttacaggacgatagagaacttaagcgacagagacggaagcagtccaatagggagtctgctcgaagatcaaggttgcgtaaacaggccgaatgtgatgagctggcccaacgcgctgaggtgttgaacgaagaaaacacaaatctcagagcagaaatcaacaagctcaaaagccaatgcgaagagcttaccaccgagaacacctctctcaaggaccaactttcattattccctccacttgaaggcataagcatggacaatgaccaccaagaaccagacaccaatcaaacaggtgccgcagagagaaaggttgattcatacaaagactcaacgtgagaagacatagagcaaaaccaattcctaacacaggtataaaaaagtagcagcagcagcaacaacaacactcggcggttctttgctaacagatggtttgtaggattttaggcatcagagatcgattggttccgaatagtttattgagggttgttggtccagtgtatgtgtgtgtaagttacgaaattagatattgggagaaaaaattccctcgtttaatgttttactttgcctttgctctacttgcagaagcgaatctgaggcaatgtgcttatctgtatcaaaattgttaccctttttattagattttcctatttattttttcttcg

SEQ ID NO: 586 - protein, 409 aa, Arabidopsis thaliana
  misc_feature (1)..(201): Pfam name: MFMR Pfam desc: G-box binding protein MFMR
  misc_feature (303)..(366): Pfam name: bZIP_1 Pfam desc: bZIP transcription factor
  misc_feature (303)..(357): Pfam name: bZIP_2 Pfam desc: Basic region leucine zipper
  misc_feature: Ceres Clone ID no. 1221348
  misc_feature: Bit score of 775.3 for HMM based on sequences of Figure 6
  misc_feature: Functional Homolog Of Ceres Clone ID no. 258841 at SEQ ID NO. 521
  misc_feature (262)..(262): Xaa is any aa, unknown, or other
  misc_feature (294)..(294): Xaa is any aa, unknown, or other
MASNEMEKSSKEKEPKTPPPSSTAPPSSQEPSSAVSAGMATPDWSGFQAYSPMPPPHGYVASSPQPHPYMWGVQHMMPPYGTPPHPYVAMYPPGGMYAHPSMPPGSYPYSPYAMPSPNGMTEVSGNTTGGTDGDAKQSEVKEKLPIKRSRGSLGSLNMITGKNNEPGKNSGASANGAYSKSGESASDGSSEGSDGNSQNDSGSGLDGKDAEAASENGGSANGPQNGSAGTPILPVSQTVPIMPMTAAGVPGPPTNLNIGMDXWGAPTSAGIPGMHGKVSTPVPGVVAPGSRDGXHSQPWLQDDRELKRQRRKQSNRESARRSRLRKQAECDELAQRAEVLNEENTNLRAEINKLKSQCEELTTENTSLKDQLSLFPPLEGISMDNDHQEPDTNQTGAAERKVDSYKDST

SEQ ID NO: 587 - protein, 398 aa, Vitis vinifera
  misc_feature (1)..(172): Pfam name: MFMR Pfam desc: G-box binding protein MFMR
  misc_feature (272)..(335): Pfam name: bZIP_1 Pfam desc: bZIP transcription factor
  misc_feature (272)..(326): Pfam name: bZIP_2 Pfam desc: Basic region leucine zipper
  misc_feature: Public GI ID no. 157335369
  misc_feature: Bit score of 445.1 for HMM based on sequences of Figure 6
  misc_feature: Functional Homolog Of Ceres Clone ID no. 258841 at SEQ ID NO. 521
MGDGEESTPPKSSKPPASTQETPSTPSYPDWSTSMQAYYGAGATPPPFFPSPVAPPSPHPYLWGGQHPMMPPYGTPLPYPALYPRGALYAHPSMATAQGVALTNTDMEVKTPDGKDPASIKKSKAASGNMGLISGKSGESGKAASVSGNDGASQSGESGSEASSDATDENANQASSAVKKRSFNLADGSNAKGNSAAQYTGGNHSASVPGKPVVPMPTTSLNIGMDLWNASPAGGTPMKTRPQSSGASPQVASATIVGREGMLQDHQWIQDERELKRQRRKQSNRESARRSRLRKQAECEELQSKVEILSNENHVLREELHRLAEQCEKLTSENNSIMEELTQLYGPEATSSLQDNNHNLVLHPINGEDDGHVQDASPLNNSSSTSDQNGKFSSNGKI

SEQ ID NO: 588 - protein, 364 aa, Vitis vinifera
  misc_feature (1)..(171): Pfam name: MFMR Pfam desc: G-box binding protein MFMR
  misc_feature (265)..(328): Pfam name: bZIP_1 Pfam desc: bZIP transcription factor
  misc_feature (265)..(319): Pfam name: bZIP_2 Pfam desc: Basic region leucine zipper
  misc_feature: Public GI ID no. 157348180
  misc_feature: Bit score of 489.0 for HMM based on sequences of Figure 6
  misc_feature: Functional Homolog Of Ceres Clone ID no. 258841 at SEQ ID NO. 521
MGAGEDTTPTKPSKPTSSAQEMPTTPSYPEWSSSMQAYYGPGATPPPFFAPSVASPTPHPYLWGSQHPLIPPYGTPVPYSALYPPGGVYAHPNLATAPSAAHLNPELEGKGPEGKDKASAKKSKGTSGNTVKGGESGKAASGSGNDGASPSAESGSEGSSDASDENTNQQEFASSKKGSFNQMLADANAQNNISGTSVQASVPGKPVISMPATNLNIGMDLWSASPGGSGATKLRPNPSGISSSVAPAAMVGREGVMPDQWIQDERELKRQKRKQSNRESARRSRLRKQAECEELQAKVETLSTENTALRDELQRLSEECEKLTSENNSIKEELTRVCGADAVAANLKEKNPTQLQSQGVEGNS

SEQ ID NO: 589 - protein, 429 aa, Vitis vinifera
  misc_feature (1)..(188): Pfam name: MFMR Pfam desc: G-box binding protein MFMR
  misc_feature (284)..(347): Pfam name: bZIP_1 Pfam desc: bZIP transcription factor
  misc_feature (284)..(338): Pfam name: bZIP_2 Pfam desc: Basic region leucine zipper
  misc_feature: Public GI ID no. 147867254
  misc_feature: Bit score of 672.3 for HMM based on sequences of Figure 6
  misc_feature: Functional Homolog Of Ceres Clone ID no. 258841 at SEQ ID NO. 521
  misc_feature (212)..(212): Xaa is any aa, unknown, or other
MGNEEEGKSPKPEKPTSPPPPDQANIHVYPDWAAMQAYYGPRVTLPPYYNSAMASGHAPHPYIWGPPQPMMPPYGPPYAAIYSPGGVYPHPAVPLNNVTKNASVMDKAKLCLLAVQAAPPLSIETPAKSSGNTDRGLMKKLKGFDGLAMSIGNGNGESTEGGSDHGLSQSGETEGSSDGSDGNTAGTFIIHVFSITVSTGGDGKTETQATSXPSAEVNAGSDKVLGVAVPPTSVTGKLAGAVLSPRMSTALELRNPPSVNAKTSPSSIPQPGAMVPSDTWILNEREIKRERRKQSNRESARRSRLRKQAETEELALKVESLNTENSVLKSEINRLRENSEKLKLENATLMEKLKSAQLEQAEDTHLNKVDDKRVLPVSTENLLSRVNNSGSVDRSTEEEGDMYEKNTNTGAKLHQLLDTSPRADAVAAG

SEQ ID NO: 590 - DNA, 1561 bp, Arabidopsis thaliana
  misc_feature: Ceres Annot ID no. 863641
  misc_feature: Encodes the peptide sequence at SEQ ID NO. 591
attctcacaaatctctcttccacccattgttatctctgtagaagcgtgagagagatcacgcgtgttcaccgacacaatcaaaatatggcgaacggagccgatagattggatctggacggtaaaccgattaagccgatgacgatatgcatgatcggtgccggaggtttcattggctctcatctctgtgagaagcttatgacggagactcctcacaaggttcttgcgcttgatgtttacaatgataagatcaagcacttgcttgagcctgataccgttcaatgggctggtcggatccagtttcatcgtatcaacattaagcatgattctagacttgaaggactgatcaagatggcagatctgacgataaatctagctgcgatctgtactccagcagattacaatacgcgtcctcttgacactatctacagcaatttcattgatgctctcccagtggttaaatactgctcagagaacaacaagcgtctgattcacttttccacttgtgaagtgtatggaaaaactataggaagctttcttccaaaggatcatcctctgcgtcaggatcctgaattttatgtactcaaagaagatatatccccttgcatctttggttcaattgagaagcagaggtggtcatatgcttgtgcaaagcaacttattgagagacttgtttacgctgagggtgctgagaatggactcgagttcaccattgtaagaccattcaactggattggacctaggatggatttcatccctggcattgatggtcctagcgagggtgtcccacgggttctagcgtgctttagtaacaatcttctgcgacgggagcctctcaagcttgtggatggtggagaatcacagagaaccttcatctacatcaaagatgctatcgaagctgtccttttgatgatcgaaaatccagagagagccaatgggcatatcttcaatgtaggcaacccaaacaatgaagtgacagtgagacaacttgctgaaatgatgactgaggtctacgccaaagtgagtggagagacagctatcgagagtccaacgatcgacgtgagctccaaagagttttatggagaaggttatgatgacagcgacaagagaatcccagacatgaccatcatcaaccgtcaacttggatggaacccgaagacgtcgctttgggacttgcttgaatcgaccttaacataccagcacacgacttatgcggaagccattaagaaggccacttcaaaaccagtcgcatcttagaggtcgtctctctttacaaacacctcaaatcatgtggtggctacgattccattctttctttttaaaaaaaaaattctcccaacagaaaccttctcttcccttattttaggccattctaaacaaatgatatatcatggtggttgattctagtttacgttttccttgttatatagtattactgttaatgtttttgaattcctttgttttgaagctttatatcttgtatttgtccgaaactaaaaagggaatggtttgtgcaaactataacattggggctttctttatatgttacatatctttggcggat

SEQ ID NO: 591 - protein, 389 aa, Arabidopsis thaliana
  misc_feature (20)..(290): Pfam name: Epimerase Pfam desc: NAD dependent epimerase/dehydratase family
  misc_feature: Ceres Annot ID no. 863641
  misc_feature: in Figure 7
  misc_feature: Bit score of 1120.9 for HMM based on sequences of Figure 7
MANGADRLDLDGKPIKPMTICMIGAGGFIGSHLCEKLMTETPHKVLALDVYNDKIKHLLEPDTVQWAGRIQFHRINIKHDSRLEGLIKMADLTINLAAICTPADYNTRPLDTIYSNFIDALPVVKYCSENNKRLIHFSTCEVYGKTIGSFLPKDHPLRQDPEFYVLKEDISPCIFGSIEKQRWSYACAKQLIERLVYAEGAENGLEFTIVRPFNWIGPRMDFIPGIDGPSEGVPRVLACFSNNLLRREPLKLVDGGESQRTFIYIKDAIEAVLLMIENPERANGHIFNVGNPNNEVTVRQLAEMMTEVYAKVSGETAIESPTIDVSSKEFYGEGYDDSDKRIPDMTIINRQLGWNPKTSLWDLLESTLTYQHTTYAEAIKKATSKPVAS

SEQ ID NO: 592 - DNA, 1567 bp, Gossypium hirsutum
  misc_feature: Ceres Clone ID no. 1948444
  misc_feature: Encodes the peptide sequence at SEQ ID NO. 593
aaccacatatatacagcacgcccctctttcatttctctccatctctatatctctcagctcttttcttctcttgtgacactgctaatattttttttattgtcgtctccggcgttcgaagatcataaaaaaccggagtcgtttcaaatggctacgagaacggatctagatgggaggccaataaagccgatgacgatatgcatgatcggtgccggaggcttcatcggctcccacctttgcgagaaattgatgtcggagacgccgcacaaggtgctcgccttggacgtttacaatgacaagatcaagcacctcctcgagcctgactctctcccttgggctggccgtattcagttccaccgacttaacatcaagcacgattctaggctcgaaggcctcatcaagatggcagatctcgtgataaatcttgctgccatctgtactccggcagattataatacgcgtccactagacacgatttacagcaattttattgatgcacttcctgtggtgaagtactgttcagagaacaacaagcgtctcattcacttctctacttgtgaagtgtatggaaaaactattggaagctttcttcctaaagattctcctctccgtcaggatcctgcctactatgttcttaaggaagatacttccccctgcatttttggttcaattgagaagcagaggtggtcctatgcatgtgctaagcagttgattgagaggcttatttatgctgaaggggcagagaatggcctcgagttcactattgtgaggccttttaactggattggacccaggatggatttcattcctggcattgatggtcctagtgagggagttcccagagttcttgcatgctttagtaataatctcctacgtcgtgaaccacttaagcttgtggatggtggcgaatctcagagaacttttatatacataaaggatgctattgaagctgttctcttgatgattgaaaatccagatagggccaatggccatattttcaatgtgggtaacccgaacaatgaagtcacagttaggcaacttgctgaaatgatgactaaggtctatgccaaggttagtggagaaactgtgctggagtctccaacagttgatgtcagctccaaggaattttatggtgagggttatgatgatagtgacaagagaattccagacatgaccataataaacaaacaactcggttggaaccccaagacatccctttgggacttgctcgaatctaccctaacctaccaacacaggacttatgccgaggctattaagaaatctatagcaaaaccttctgcatcctaaaggaggctagatgtttaaaccacggctaagaaaggactcattaaatgtgcttcatggcaaatgtttcaattcttctttcccccccttcttttaggaagtcttaaatatatcataatgttgcttttctttatacccccccccctttttttttgtcttccccgtgttggtagttgatagctcactgtagctctggcagctatgttatcagaatggttttatgtggagacgttcttactagggaatggtattgttttagtattac

SEQ ID NO: 593 - protein, 386 aa, Gossypium hirsutum
  misc_feature (17)..(287): Pfam name: Epimerase Pfam desc: NAD dependent epimerase/dehydratase family
  misc_feature: Ceres Clone ID no. 1948444
  misc_feature: in Figure 7
  misc_feature: Bit score of 1110.0 for HMM based on sequences of Figure 7
  misc_feature: Functional Homolog Of Ceres Annot ID no. 863641 at SEQ ID NO. 591
MATRTDLDGRPIKPMTICMIGAGGFIGSHLCEKLMSETPHKVLALDVYNDKIKHLLEPDSLPWAGRIQFHRLNIKHDSRLEGLIKMADLVINLAAICTPADYNTRPLDTIYSNFIDALPVVKYCSENNKRLIHFSTCEVYGKTIGSFLPKDSPLRQDPAYYVLKEDTSPCIFGSIEKQRWSYACAKQLIERLIYAEGAENGLEFTIVRPFNWIGPRMDFIPGIDGPSEGVPRVLACFSNNLLRREPLKLVDGGESQRTFIYIKDAIEAVLLMIENPDRANGHIFNVGNPNNEVTVRQLAEMMTKVYAKVSGETVLESPTVDVSSKEFYGEGYDDSDKRIPDMTIINKQLGWNPKTSLWDLLESTLTYQHRTYAEAIKKSIAKPSAS

SEQ ID NO: 594 - DNA, 1170 bp, Populus balsamifera subsp. trichocarpa
  misc_feature: Ceres Annot ID no. 1541782
  misc_feature: Encodes the peptide sequence at SEQ ID NO. 595
atggcatcatcagtggtgagggttgatcttgatggaaaaccaataaatccgctaacaatttgcatgatcggtgctggtggtttcattgggtcccacctgtgtgagaagatcttgaacgagactcaacacaagatcttagcccttgatgtttacaatgacaagatcaagcaccttctcgaaccggacagcctcccttgggctggccggatccagttccaccgtatcaatatcaaacacgactctcgcctcgaaggcctcatcaagatgtcagatctgacgataaatctggctgcgatctgtactccggcggattataatacgcgtcctttggatacgatttatagcaactttatcgacgcgttgcctgtggcgaagtactgttcagagaatgggaagcgtctgattcacttctcgacttgtgaagtgtatgggaaaactattgggagttttcttcctaaagacagtcctcttcgtcaggatcctgcatattatgtgcttaaagaagatgcctctccctgcatttttggttccattgagaagcagagatggtcttatgcgtgtgcaaagcaattgattgagaggctggtttatgctgagggtgcagagaatggacttgagttcaccatcgtgaggcctttcaactggattggacccagaatggattttattcccggtgttgatggcccaagtgagggcgttccccgggttcttgcttgctttagcaatgctcttcttcgccgggagccgctcaagcttgtggatggtggcgaatcccagagaacatttgtttatattaaggatgccatcgaggctgttctcttgatgattgaaaatccttccagggccaatggtcatatttttaacgttggcaaccctaacaatgaagtcactgtgaggcagcttgctgaaatgatgacagcggtctacgcaaatgtaagtggagaacctgctctggaggaaccgacagttgatgtcagctccaaagagttctacggtgagggatatgacgatagtgacaagagaattccagacatgaccataatcaatagacaacttggttggaaccccaagacgtctctgtgggacttgctcgattcaaccctcacttatcaacacaagacttatgccgaggcaatcaagaaggtcatgtcacaacccacaaccagctga

SEQ ID NO: 595 - protein, 389 aa, Populus balsamifera subsp. trichocarpa
  misc_feature (20)..(290): Pfam name: Epimerase Pfam desc: NAD dependent epimerase/dehydratase family
  misc_feature: Ceres Annot ID no. 1541782
  misc_feature: in Figure 7
  misc_feature: Bit score of 1106.3 for HMM based on sequences of Figure 7
  misc_feature: Functional Homolog Of Ceres Annot ID no. 863641 at SEQ ID NO. 591
MASSVVRVDLDGKPINPLTICMIGAGGFIGSHLCEKILNETQHKILALDVYNDKIKHLLEPDSLPWAGRIQFHRINIKHDSRLEGLIKMSDLTINLAAICTPADYNTRPLDTIYSNFIDALPVAKYCSENGKRLIHFSTCEVYGKTIGSFLPKDSPLRQDPAYYVLKEDASPCIFGSIEKQRWSYACAKQLIERLVYAEGAENGLEFTIVRPFNWIGPRMDFIPGVDGPSEGVPRVLACFSNALLRREPLKLVDGGESQRTFVYIKDAIEAVLLMIENPSRANGHIFNVGNPNNEVTVRQLAEMMTAVYANVSGEPALEEPTVDVSSKEFYGEGYDDSDKRIPDMTIINRQLGWNPKTSLWDLLDSTLTYQHKTYAEAIKKVMSQPTTS

SEQ ID NO: 596 - protein, 388 aa, Vitis vinifera
  misc_feature (19)..(289): Pfam name: Epimerase Pfam desc: NAD dependent epimerase/dehydratase family
  misc_feature: Public GI ID no. 157352120
  misc_feature: in Figure 7
  misc_feature: Bit score of 1114.8 for HMM based on sequences of Figure 7
  misc_feature: Functional Homolog Of Ceres Annot ID no. 863641 at SEQ ID NO. 591
MASAARLDLDGNAIKPMTICMIGAGGFIGSHLCEKLMAETMHKVLAVDVYNDKIRHLLEPAAHPWSDRIQFHRINIKHDSRLEGLIKMADLTVNLAAICTPADYNTRPLDTIYSNFIDALPVVKYCSENNKRLIHFSTCEVYGKTIGSFLPKDSPLRQDPAYYLLKEDASPCIFGSIEKQRWSYACAKQLIERLIYAEGAENGLEFTIVRPFNWIGPRMDFIPGIDGPSEGVPRVLACFSNNLLRREPLKLVDGGQSQRTFVYIKDAIEAVLLMIDNPGRANGHIFNVGNPNNEATVKQLAEMMTEVYAKVSGEPSLEVPTVDVSSKEFYGEGYDDSDKRIPDMTIINKQLGWNPKTSLWDLLESTLTYQHRTYAEAIKQAIAKPVAS

SEQ ID NO: 597 - DNA, 1161 bp, Solanum lycopersicum
  misc_feature: Ceres Annot ID no. 8460479
  misc_feature: Encodes the peptide sequence at SEQ ID NO. 598
atggcaggaagggtagatctggacggaaatccgattaagccgattacaatatgtatgattggtgccggaggttttattggctcgcatctatgtgaaaaattgatgtcggagacgccgcacaaggtgctcgccgtcgatgttagcaatgacaagatcaagcatcttctcgaaccggctactctcgcctgggctgatcgtattgagtttcaccgtatcaacattaagaacgattctcgtcttgaaggccttatcaagatggcagatctgaccatcaatcttgctgcgatctgcactccagctgattacaacactcgtccacttgataccatttacagcaacttcattgatgctcttccagtggtgaagtactgctcagaaaatggaaagcgacttattcatttttccacctgtgaaatttatgggaaaacaataggagcctttttacccaaagacagcccactgcggcaggatcctgcatactatgtgcttaaggaagacacctccccttgcatttttggacctattgagaagcagaggtggtcatatgcctgtgcaaagcaattgattgagaggttgatatatgctgagggtgctgagaatggtttagaattcactattgtaaggccgttcaattggattggtcctagaatggatttcattccgggcattgatggtcctagtgaaggtgttccacgagtgttagcttgctttagtaataacctcttaagacgtgaaccgctgaaattagtggatggtggggaatcacagagaacttttatatatatcaaggatgctattgaagctgttctcttgatgattgaaaatcctgcaagggccaatggtcatatttttaatgtgggcaatcctaacaatgaagttactgtgcgacagctagctgaaatgatgaccaaggtctattcgaaggtgagtggagaatcttctcttgaaacgcctaccattgatataagttcgaaagaattttatggagaagggtatgatgacagtgacaagagaattccggatatgactataatcaacaaacagcttgcttggaacccgaaaacctccctatgggacttgcttgaatcaacactcacctaccaacacaggacatatgctgaggctatcaagcaggccatgtcaaagtcaactgcaaattga

SEQ ID NO: 598 - protein, 386 aa, Solanum lycopersicum
  misc_feature (17)..(287): Pfam name: Epimerase Pfam desc: NAD dependent epimerase/dehydratase family
  misc_feature: Ceres Annot ID no. 8460479
  misc_feature: in Figure 7
  misc_feature: Bit score of 1104.4 for HMM based on sequences of Figure 7
  misc_feature: Functional Homolog Of Ceres Annot ID no. 863641 at SEQ ID NO. 591
MAGRVDLDGNPIKPITICMIGAGGFIGSHLCEKLMSETPHKVLAVDVSNDKIKHLLEPATLAWADRIEFHRINIKNDSRLEGLIKMADLTINLAAICTPADYNTRPLDTIYSNFIDALPVVKYCSENGKRLIHFSTCEIYGKTIGAFLPKDSPLRQDPAYYVLKEDTSPCIFGPIEKQRWSYACAKQLIERLIYAEGAENGLEFTIVRPFNWIGPRMDFIPGIDGPSEGVPRVLACFSNNLLRREPLKLVDGGESQRTFIYIKDAIEAVLLMIENPARANGHIFNVGNPNNEVTVRQLAEMMTKVYSKVSGESSLETPTIDISSKEFYGEGYDDSDKRIPDMTIINKQLAWNPKTSLWDLLESTLTYQHRTYAEAIKQAMSKSTAN

SEQ ID NO: 599 - DNA, 1533 bp, Zea mays
  misc_feature: Ceres Clone ID no. 300029
  misc_feature: Encodes the peptide sequence at SEQ ID NO. 600
agggagcacccttccgaagccacgccaccgacatcgcctcgtgacccgacgcacgggatagaatcccattccccccgaaccctgcgccggggacccagccagctagctacatccactgatccacgcgcattccccgtaccaccgccaccgcgccgcgtcacggaaggaggaggatgtcgtcgtctccctcgccggcggccacccgcctggatctggatggcaaccccatcgcgcccctcaccatctgcatgatcggcgccggcggcttcatcggctcccacctctgcgagaagctaatggccgagacgcaccacaccgtcctcgctgttgacgtctactgcgacaagatccgccacctcgtcgaccccgcgccgccgcacctcgccgggcgcatctcattccaccgccttaacatcaaaaacgactccaggctagaggggctcatcaagatggccgatctgaccataaacctggccgcgatctgcacgccggccgactacaacactcgcccactcgacaccatctacagcaacttcatcgacgcactcccagtggtcaagtactgctccgagaacagcaagcgtctcatccacttctccacctgcgaggtctacggcaagaccatcggcagcttcctccccaaagaccacccgctccgcaaggagcctgaattttatgttcttaaagaagatgagtcgccctgtatttttggtccaatcgtgaaacaaagatggtcctatgcatgcgcaaaacaacttattgagaggcttgtatttgctgaaggtgcagaaaatggccttgatttcacaatcgtgagacctttcaattggattggaccaaggatggacttcattcctggtgttgatggtcctagtgaaggtgtgcctcgggttttggcttgctttagtaacaatctgctccggagagagcccttgaagcttgttgatgggggtcagtctcagagaacctttgtctacatcaaggatgccatcgaagctgtagtgctgatgattgaaaatcctgctcgagccaatggccacatcttcaatgttgggaatccgaacaatgaagttaccgttagggagttggcccaaatgatgacagaggtctacgcaaatgtctcaggagaggcaccgctggatgagcccatgattgacgtgagctcgagtcagttctacggcgaaggatacgatgatagcgacaagaggatccccgacatgactataatcaacaagcagctaggttggaacccaaagacgcctctcaaggatctgctggagacaacgctgacgtatcagcacaagacatacaaagaagctgtgaaaaggcaaatgtcgcaggcttcagcgtcgacttagatagcgtgcccctggctctcgtctagagcctagttgcagctgttaagatgtttcggaagcgcaggtcacacatacgctagtgatctttttttttgaggccctagatgtccgtgttgttagataatcaagggatgctgtatcagtatgatatatttgtggcagagttgatgtatcc

SEQ ID NO: 600 - protein, 394 aa, Zea mays
  misc_feature (24)..(294): Pfam name: Epimerase Pfam desc: NAD dependent epimerase/dehydratase family
  misc_feature: Ceres Clone ID no. 300029
  misc_feature: in Figure 7
  misc_feature: Bit score of 1104.8 for HMM based on sequences of Figure 7
  misc_feature: Functional Homolog Of Ceres Annot ID no. 863641 at SEQ ID NO. 591
MSSSPSPAATRLDLDGNPIAPLTICMIGAGGFIGSHLCEKLMAETHHTVLAVDVYCDKIRHLVDPAPPHLAGRISFHRLNIKNDSRLEGLIKMADLTINLAAICTPADYNTRPLDTIYSNFIDALPVVKYCSENSKRLIHFSTCEVYGKTIGSFLPKDHPLRKEPEFYVLKEDESPCIFGPIVKQRWSYACAKQLIERLVFAEGAENGLDFTIVRPFNWIGPRMDFIPGVDGPSEGVPRVLACFSNNLLRREPLKLVDGGQSQRTFVYIKDAIEAVVLMIENPARANGHIFNVGNPNNEVTVRELAQMMTEVYANVSGEAPLDEPMIDVSSSQFYGEGYDDSDKRIPDMTIINKQLGWNPKTPLKDLLETTLTYQHKTYKEAVKRQMSQASAST

SEQ ID NO: 601 - DNA, 1580 bp, Panicum virgatum
  misc_feature: Ceres Clone ID no. 1788124
  misc_feature: Encodes the peptide sequence at SEQ ID NO. 602
aggccaccgccaccgccaccgacatcgcctggtaacccgtcgtccccgaatccacccacccacattccccgaaccccacgccgcattctccccgatccaaccgcgccgccgcaccaggaggggaaggaagaagaaaggagacggaccatgtcgtcgccgcccgcccgcatggatctggacggcaaccccgtcgcgcccctcaccatctgcatgatcggcgcaggtggcttcatcggctcccacctctgcgagaagctcatggccgagaccgcacacgtcgtcctcgccgtcgacgtctactgcgacaagatccgccacctcgtcgaccccgcgccgccgcacctcgctggacgaatctccttccaccgcctcaacatcaagaacgactccaggctcgagggactcatcaagatggccgatctgacgataaacctggcggccatctgcacgcccgccgactacaacacgcggcccctcgacaccatctacagcaacttcatcgacgccctcccagtggtcaagtactgctccgagaacaacaagcgtctcatccacttctccacgtgcgaggtctacggcaagaccatcggcagcttcctccccaaagaccaccctctccgcaaggaacctgaattttatgttctaaaagaagatgagtcgccctgcatttttggtccaatcgtgaaacagcgatggtcctatgcatgtgcaaagcaacttatcgagaggcttatttttgctgaaggcgcggaaaatggacttgagttcacaattgtgagacctttcaattggattggaccaaggatggacttcattcctggtgttgatggccctagtgagggtgtaccgcgggttttggcctgcttcagtaataatctgctccgccgagagcccttgaagcttgttgatgggggccagtcccaaagaacttttgtctacattaaggatgccatcgaagctgttgttttgatgattgaaaatcctgctcgagctaatggtcacatcttcaatgttgggaatcctaacaatgaagttactgttagggagttggcccaaatgatgacagaggtctatgcaaacgtctcaggagaggcaccactagatgaacccatgattgacgtgagttcgagtcagttctacggtgaaggatatgatgatagtgacaagagaatccctgacataactataatcaacaagcagctaggttggaatccaaagacgcctctcaaggatttgctggagacaacattgacatatcagcacaagacatacaaggaagctgtcaaaaggcaaatgtcacaggcttcagcgtcgagttagatagggaaaggtggtggcgggctctcatttagagcgcagtcacaggtgctatggtgttttggaagtcaggatacatatatgctagtaatcgtttttgatgctctagtcgctccctagatgacatcttgttatcagggaagggatgttatccgattccgtgctgctatcaagggaagggatgttatccgtatggcagagttgatgtattctatccattgtactttgattgctcctctgtgctgtgtcaagtcattctttgg

SEQ ID NO: 602 - protein, 390 aa, Panicum virgatum
  misc_feature (20)..(290): Pfam name: Epimerase Pfam desc: NAD dependent epimerase/dehydratase family
  misc_feature: Ceres Clone ID no. 1788124
  misc_feature: in Figure 7
  misc_feature: Bit score of 1104.0 for HMM based on sequences of Figure 7
  misc_feature: Functional Homolog Of Ceres Annot ID no. 863641 at SEQ ID NO. 591
MSSPPARMDLDGNPVAPLTICMIGAGGFIGSHLCEKLMAETAHVVLAVDVYCDKIRHLVDPAPPHLAGRISFHRLNIKNDSRLEGLIKMADLTINLAAICTPADYNTRPLDTIYSNFIDALPVVKYCSENNKRLIHFSTCEVYGKTIGSFLPKDHPLRKEPEFYVLKEDESPCIFGPIVKQRWSYACAKQLIERLIFAEGAENGLEFTIVRPFNWIGPRMDFIPGVDGPSEGVPRVLACFSNNLLRREPLKLVDGGQSQRTFVYIKDAIEAVVLMIENPARANGHIFNVGNPNNEVTVRELAQMMTEVYANVSGEAPLDEPMIDVSSSQFYGEGYDDSDKRIPDITIINKQLGWNPKTPLKDLLETTLTYQHKTYKEAVKRQMSQASASS

SEQ ID NO: 603 - protein, 398 aa, Oryza sativa subsp. japonica
  misc_feature (28)..(298): Pfam name: Epimerase Pfam desc: NAD dependent epimerase/dehydratase family
  misc_feature: Public GI ID no. 115442487
  misc_feature: in Figure 7
  misc_feature: Bit score of 1106.8 for HMM based on sequences of Figure 7
  misc_feature: Functional Homolog Of Ceres Annot ID no. 863641 at SEQ ID NO. 591
MSSSSSPPAASAAARLDLDGNPIAPLTICMIGAGGFIGSHLCEKLMAETAHVVYAVDVYCDKIRHLVDPAPPHLHGRISFHRLNIKNDSRLEGLIKMADLTINLAAICTPADYNTRPLDTIYSNFIDALPVVKYCSENNKRLIHFSTCEVYGKTIGSFLPTDHPLRKEPEFYVLKEDESPCIFGPIVKQRWSYACAKQLIERLIFAEGAENGLEFTIVRPFNWIGPRMDFIPGVDGPSEGVPRVLACFSNNLLRREPLKLVDGGQSQRTFVYIKDAIEAVHLMIENPARANGQIFNVGNPNNEVTVRQLAEMMTEVYANVSGEPPLDEPMIDVSSKQFYGEGYDDSDKRIPDMTIINKQLGWNPKTPLKDLLETTLTYQHKTYKEAIKRQMSQASASS

SEQ ID NO: 604 - DNA, 1194 bp, Sorghum bicolor
  misc_feature: Ceres Annot ID no. 6017305
  misc_feature: Encodes the peptide sequence at SEQ ID NO. 605
atgtcgtcgtcgtctccctctccggcggcggcggccgcgcgcctggatctggacggcaaccccatcgcgcccctcaccatctgcatgattggcgccggcggcttcatcgggtcccacctctgcgagaagctcatggccgagacgcgccacgtcgtcctcgccgtcgacgtctactgcgacaagatccgccacctcgtcgaccccgcgccgccgcacctcgccggccgcatctctttccaccgcctcaacatcaagaacgactccaggctcgagggcctcatcaagatggccgatctgaccatcaacctggcggccatctgcacgccggcggactacaacacgcgccccctcgacaccatctacagcaacttcatcgacgcactcccagtggtcaaatactgctccgagaacagcaagcgtctcatccacttctccacctgcgaggtctatggcaagaccatcggcagcttcctccccaaagaccacccgctccgcaaggaacctgaattttatgttctgaaagaagatgagtcaccctgtatttttggtccaattgtgaaacaacgatggtcctatgcatgcgcaaagcaacttattgagaggcttatatttgctgaaggcgcagaaaatggccttgaattcacgattgtgagacctttcaattggattggcccaagaatggacttcattcctggtgttgatggtcctagtgagggtgtaccccgggttttggcttgcttcagtaacaatctgctccgccgagagcccttgaagcttgttgatgggggccagtctcagagaacttttgtttacattaaggatgccatcgaagctgttgtgctaatgattgaaaatcctgctcgagccaatggtcacatcttcaatgttgggaatcctgacaatgaggttactgttagggagttggcccaaatgatgacagaggtctatgcaaacgtctcaggagaggcaccactggatgagcccatgattgatgtaagttcgagtcagttctatggtgaaggatatgatgacagtgataagagaattcccgacatgactataatcaacaagcagctaggttggaacccaaagactcctctcaaggatctgctggagacaacgttgacatatcagcacaagacatacaaagaagctgtgaagaggcaaatgtcgcaggcttcatcaacgagttag

SEQ ID NO: 605 - protein, 397 aa, Sorghum bicolor
  misc_feature (27)..(297): Pfam name: Epimerase Pfam desc: NAD dependent epimerase/dehydratase family
  misc_feature: Ceres Annot ID no. 6017305
  misc_feature: in Figure 7
  misc_feature: Bit score of 1104.3 for HMM based on sequences of Figure 7
  misc_feature: Functional Homolog Of Ceres Annot ID no. 863641 at SEQ ID NO. 591
MSSSSPSPAAAAARLDLDGNPIAPLTICMIGAGGFIGSHLCEKLMAETRHVVLAVDVYCDKIRHLVDPAPPHLAGRISFHRLNIKNDSRLEGLIKMADLTINLAAICTPADYNTRPLDTIYSNFIDALPVVKYCSENSKRLIHFSTCEVYGKTIGSFLPKDHPLRKEPEFYVLKEDESPCIFGPIVKQRWSYACAKQLIERLIFAEGAENGLEFTIVRPFNWIGPRMDFIPGVDGPSEGVPRVLACFSNNLLRREPLKLVDGGQSQRTFVYIKDAIEAVVLMIENPARANGHIFNVGNPDNEVTVRELAQMMTEVYANVSGEAPLDEPMIDVSSSQFYGEGYDDSDKRIPDMTIINKQLGWNPKTPLKDLLETTLTYQHKTYKEAVKRQMSQASSTS

SEQ ID NO: 606 - protein, 382 aa, Vitis vinifera
  misc_feature (16)..(285): Pfam name: Epimerase Pfam desc: NAD dependent epimerase/dehydratase family
  misc_feature: Public GI ID no. 147771536
  misc_feature: in Figure 7
  misc_feature: Bit score of 1045.9 for HMM based on sequences of Figure 7
  misc_feature: Functional Homolog Of Ceres Annot ID no. 863641 at SEQ ID NO. 591
MARLDLDGKEIAPLTICLIGGAGFIGSHLCELLMTHTHHSAIVIDVSSDKITRLLEKSCSWSNRIEFHKINIKNDSRLETLIKSSDLTINLAAICTPADYNTRPLDTIYSNFLDAIPVVKYCTESNKRLIHFSTCEVYGKTIGSFLPADHSLRQDPDFYILKEDVSPCIFGPVEKQRWSYACAKQMIERLIYAEGAEHGLKFTIVRPFNWIGPRMDFIPGIDGPTEGVPRVLACFSNNLLRGEPLKLVDGGKSQRTFCYIKDAIEAVLLMIENPERANGQIFNVGNPNNEVTMRQLAELMIEVYGKISVGSSDLTTVDVSSKDFYGVGYDDSDKRIPDMTIINRQLGWNPKTPLQDLLEVTLTYQHQTYSQSIKKALSNPTY

SEQ ID NO: 607 - DNA, 1496 bp, Arabidopsis thaliana
  misc_feature: Ceres cDNA ID no. 23374400
  misc_feature: Encodes the peptide sequence at SEQ ID NO. 608
ttttttagattctctctctacagagaacttgattattttttctgatctgagaaaaaaaatggcgaatggagctaatagagtggatctcgacgggaaaccgatacaaccgttgacaatatgcatgatcggcgccggaggtttcatcggttcacatctctgtgaaaagctcttgaccgagacgccacataaggtgcttgcgctcgatgtttacaacgataagatcaaacacttgcttgagcctgataccgttgaatggagtggtcggatccagtttcatcgtatcaatattaagcatgattcgagacttgaaggtcttgttaagatggcggatctgattataaatcttgctgcgatctgtactccagctgattacaatacacgtcctcttgatactatctacagcaatttcattgatgcgcttccagttgtgaaatactgttctgagaacaacaagcgtctcattcacttttctacctgtgaagtttatggaaaaaccattggaagctttcttcctaaggatcatcctctgcgtgatgatcctgctttctatgttcttaaagaagatatttccccttgcatatttggttcaattgagaagcagaggtggtcatatgcgtgtgcaaagcaactgattgagagacttgtttacgctgagggtgctgagaatgggcttgagttcaccatcgtacgaccttttaactggattggacctaggatggatttcatccccggcattgatggtcctagcgaaggtgtcccacgtgtccttgcctgctttagtaacaatcttctacgtcgtgagcctctcaagcttgtagatggtggagaatcacagagaactttcgtctacatcaatgatgctattgaagctgtccttttgatgattgaaaacccagagagggcaaatgggcacatcttcaacgtaggcaacccgaacaacgaagttacagtaagacagctcgctgaaatgatgaccgaggtttacgcaaaagtgagtggagaaggagccattgagagcccaacggttgatgttagctccaaagagttttacggggaaggttatgatgacagtgacaagagaatcccagacatgaccatcattaaccgccaactcggatggaacccgaaaacatcgctatgggacttgctcgagtcgaccttaacctaccagcacaggacatacgctgaagctgtgaagaaggcaacatccaaaccagtggcttcctaaactctccaagaccccaacgaaactcgttaaacacgcgtcattttggcattttactctattcgattctatttttttcatcccagagaaaactttttttcttttttctttttaagaaaacgatataatcacggtggttcgttccaagtataccttttcgtttgtaagttttctctttttgtttggtttgtttggccatgtatgtcggagctgtcagaaagcaagaggttaatcgtttgtagcgaatgataaatgttcgagtttatatttt

SEQ ID NO: 608 - protein, 389 aa, Arabidopsis thaliana
  misc_feature (20)..(290): Pfam name: Epimerase Pfam desc: NAD dependent epimerase/dehydratase fam
  misc_feature (24)..(272): Pfam name: NAD_binding_4 Pfam desc: Male sterility protein
  misc_feature: Ceres cDNA ID no. 23374400
  misc_feature: Bit score of 1103.4 for HMM based on sequences of Figure 7
  misc_feature: Functional Homolog Of Ceres Annot ID no. 863641 at SEQ ID NO. 591
MANGANRVDLDGKPIQPLTICMIGAGGFIGSHLCEKLLTETPHKVLALDVYNDKIKHLLEPDTVEWSGRIQFHRINIKHDSRLEGLVKMADLIINLAAICTPADYNTRPLDTIYSNFIDALPVVKYCSENNKRLIHFSTCEVYGKTIGSFLPKDHPLRDDPAFYVLKEDISPCIFGSIEKQRWSYACAKQLIERLVYAEGAENGLEFTIVRPFNWIGPRMDFIPGIDGPSEGVPRVLACFSNNLLRREPLKLVDGGESQRTFVYINDAIEAVLLMIENPERANGHIFNVGNPNNEVTVRQLAEMMTEVYAKVSGEGAIESPTVDVSSKEFYGEGYDDSDKRIPDMTIINRQLGWNPKTSLWDLLESTLTYQHRTYAEAVKKATSKPVAS

SEQ ID NO: 609 - protein, 372 aa, Arabidopsis thaliana
  misc_feature (3)..(273): Pfam name: Epimerase Pfam desc: NAD dependent epimerase/dehydratase family
  misc_feature: Ceres Peptide ID no. 1009650
  misc_feature: Bit score of 1064.0 for HMM based on sequences of Figure 7
  misc_feature: Functional Homolog Of Ceres Annot ID no. 863641 at SEQ ID NO. 591
MTICMIGAGGFIGSHLCEKLMTETPHKVLALDVYNDKIKHLLEPDTVQWAGRIQFHRINIKHDSRLEGLIKMADLTINLAAICTPADYNTRPLDTIYSNFIDALPVVKYCSENNKRLIHFSTCEVYGKTIGSFLPKDHPLRQDPEFYVLKEDISPCIFGSIEKQRWSYACAKQLIERLVYAEGAENGLEFTIVRPFNWIGPRMDFIPGIDGPSEGVPRVLACFSNNLLRREPLKLVDGGESQRTFIYIKDAIEAVLLMIENPERANGHIFNVGNPNNEVTVRQLAEMMTEVYAKVSGETAIDSPTIDVSSKEFYGEGYDDSDKRIPDMTIINRQLGWNPKTSLWDLLESTLTYQHTTYAEAIKKATSKPVAS

SEQ ID NO: 610 - protein, 401 aa, Arabidopsis thaliana
  misc_feature (20)..(290): Pfam name: Epimerase Pfam desc: NAD dependent epimerase/dehydratase family
  misc_feature: Ceres Peptide ID no. 2182905
  misc_feature: Bit score of 1102.0 for HMM based on sequences of Figure 7
  misc_feature: Functional Homolog Of Ceres Annot ID no. 863641 at SEQ ID NO. 591
MANGADRLDLDGKPIKPMTICMIGAGGFIGSHLCEKLMTETPHKVLALDVYNDKIKHLLEPDTVQWAGRIQFHRINIKHDSRLEGLIKMADLTINLAAICTPADYNTRPLDTIYSNFIDALPVVKYCSENNKRLIHFSTCEVYGKTIGSFLPKDHPLRQDPEFYVLKEDISPCIFGSIEKQRWSYACAKQLIERLVYAEGAENGLEFTIVRPFNWIGPRMDFIPGIDGPSEGVPRVLACFSNNLLRREPLKLVDGGESQRTFIYIKDAIEAVLLMIENPERANGHIFNVGNPNNEVTVRQLAEMMTEHTLKCCKTKNGQVYAKVSGETAIESPTIDVSSKEFYGEGYDDSDKRIPDMTIINRQLGWNPKTSLWDLLESTLTYQHTTYAEAIKKATSKPVAS

SEQ ID NO: 611 - protein, 384 aa, Arabidopsis thaliana
  misc_feature (3)..(273): Pfam name: Epimerase Pfam desc: NAD dependent epimerase/dehydratase family
  misc_feature: Ceres Peptide ID no. 2182906
  misc_feature: Bit score of 1045.0 for HMM based on sequences of Figure 7
  misc_feature: Functional Homolog Of Ceres Annot ID no. 863641 at SEQ ID NO. 591
MTICMIGAGGFIGSHLCEKLMTETPHKVLALDVYNDKIKHLLEPDTVQWAGRIQFHRINIKHDSRLEGLIKMADLTINLAAICTPADYNTRPLDTIYSNFIDALPVVKYCSENNKRLIHFSTCEVYGKTIGSFLPKDHPLRQDPEFYVLKEDISPCIFGSIEKQRWSYACAKQLIERLVYAEGAENGLEFTIVRPFNWIGPRMDFIPGIDGPSEGVPRVLACFSNNLLRREPLKLVDGGESQRTFIYIKDAIEAVLLMIENPERANGHIFNVGNPNNEVTVRQLAEMMTEHTLKCCKTKNGQVYAKVSGETAIESPTIDVSSKEFYGEGYDDSDKRIPDMTIINRQLGWNPKTSLWDLLESTLTYQHTTYAEAIKKATSKPVAS

SEQ ID NO: 612 - protein, 389 aa, Arabidopsis thaliana
  misc_feature (20)..(290): Pfam name: Epimerase Pfam desc: NAD dependent epimerase/dehydratase family
  misc_feature: Public GI ID no. 14596185
  misc_feature: Bit score of 1109.3 for HMM based on sequences of Figure 7
  misc_feature: Functional Homolog Of Ceres Annot ID no. 863641 at SEQ ID NO. 591
MANGADRLDLDGKPIKPMTICMIGAGGFIGSHLCEKLMTETPHKVLALDVYNDKIKHLLEPDTVQWAGRIQFHRINIKHDSRLEGLIKMADLTINLAAICTPADYNTRPLDTIYSNFIDALPVVKYCSENNKRLIHFSTCEVYGKTIGSFLPKDHPLRQDPEFYVLKEDISPCIFGSIEKQRWSYACAKQLIERLVYAEGAENGLEFTIVRPFNWIGPRMDFIPGIDGPSEGVPRVLACFSNNLLRREPLKLVDGGESQRTFIYIKDAIEAVLLMIENPERANGHIFNVGNPNNEVTVRQLAEMMTEVYAKVSGETAIESPTIDVSSKEFYGEGYDDSDKRIPDMTIINRQLGCTPKTSLWDLLESTLTYQHTTYAEAIKKATSKPVAS

SEQ ID NO: 613 - protein, 388 aa, Vitis vinifera
  misc_feature (19)..(289): Pfam name: Epimerase Pfam desc: NAD dependent epimerase/dehydratase family
  misc_feature: Public GI ID no. 157346638
  misc_feature: Bit score of 1107.8 for HMM based on sequences of Figure 7
  misc_feature: Functional Homolog Of Ceres Annot ID no. 863641 at SEQ ID NO. 591
MASAARLDLDGNAIKPMTICMIGAGGFIGSHLCEKLMAETMHKVLAVDVYSDKIKHLLEPSTHPWSDRIQFHRINIKHDSRLEGLIKMADLTINLAAICTPADYNTRPLDTIYSNFIDALPVVKYCSENNKRLIHFSTCEVYGKTIGSFLPKDSPLWQDPTYYVLKEDASPCIFGPIEKQRWSYACAKQLIERLIYAEGAENDLEFTIVRPFNWIGPRMDFIPGIDGPSEGVPRVLACFSNNLLRHEPLKLVDGGQSQRTFVYIKDAIEAVLLMIDNPARANGHIFNVGNPNNEVTVRQLAEMMTEVYAKVSGEPSLEVPTVDVSSKEFYGEGYDDSDKRIPDMTIINKQLGWNPKTSLWDLLESTLTYQHRTYAEAIKQAIAKPVAS

SEQ ID NO: 614 - DNA, 1444 bp, Gossypium hirsutum
  misc_feature: Ceres Clone ID no. 1969770
  misc_feature: Encodes the peptide sequence at SEQ ID NO. 615
ataaaaaaccggagtcgtttcaaatggctacgagaacggatctagatgggaggccaataaagccgatgacgatatgcatgatcggtgccggaggcttcatcggctcccacctttgcgagaaattgatgtcggagacgccgcacaaggtgctcgccttggacgtttacaatgacaagatcaagcacctcctcgagcctgactctctcccttgggctggccgtattcagttccaccgacttaacatcaagcacgattctaggctcgaaggcctcatcaagatggcagatctcgtgataaatcttgctgccatctgtactccggcagattataatacgcgtccactagacacgatttacagcaattttattgatgcacttcctgtggtgaagtactgttcagagaacaacaagcgtctcattcacttctctacttgtgaagtgtatggaaaaactattggaagctttcttcctaaagattctcctctccgtcaggatcctgcctactatgttcttaaggaagatacttccccctgcatttttggttcaattgggaagcagaggtggtcctatgcatgtgctaagcagttgattgagaggcttatttatgctgaaggggcagagaatggcctcgagttcactattgtgaggccttttaactggattggacccaggatggatttcattcctggcattgatggtcctagtgagggagttcccagagttcttgcatgctttagtaataatctcctacgtcgtgaaccacttaagcttgtggatggtggcgaatctcagagaacttttatatacataaaggatgctattgaagctgttctcttgatgattgaaaatccagatagggccaatggccatattttcaatgtgggtaacccgaacaatgaagtcacagttaggcaacttgctgaaatgatgactaaggtctatgccaaggttagtggagaaactgtgctggagtctccaacagttgatgtcagctccaaggaattttatggtgagggttatgatgatagtgacaagagaattccagacatgaccataataaacaaacaactcggttggaaccccaagacatccctttgggacttgctcgaatctaccctaacctaccaacacaggacttatgccgaggctattaagaaatctatagcaaaaccttctgcatcctaaaggaggctagatgtttaaaccacggctaagaaaggactcattaaatgtgcttcatggcaaatgtttcaattcttctttcccccccttcttttaggaagtcttaaatatatcataatgttgcttttctttatacccccccccctttttttttgtcttccccgtgttggtagttgatagctcactgtagctctggcagctatgttatcagaatggttttatgtggagacgttcttactagggaatggtattgttttagtatt

SEQ ID NO: 615 - protein, 386 aa, Gossypium hirsutum
  misc_feature (17)..(287): Pfam name: Epimerase Pfam desc: NAD dependent epimerase/dehydratase fam
  misc_feature: Ceres Clone ID no. 1969770
  misc_feature: Bit score of 1106.9 for HMM based on sequences of Figure 7
  misc_feature: Functional Homolog Of Ceres Annot ID no. 863641 at SEQ ID NO. 591
MATRTDLDGRPIKPMTICMIGAGGFIGSHLCEKLMSETPHKVLALDVYNDKIKHLLEPDSLPWAGRIQFHRLNIKHDSRLEGLIKMADLVINLAAICTPADYNTRPLDTIYSNFIDALPVVKYCSENNKRLIHFSTCEVYGKTIGSFLPKDSPLRQDPAYYVLKEDTSPCIFGSIGKQRWSYACAKQLIERLIYAEGAENGLEFTIVRPFNWIGPRMDFIPGIDGPSEGVPRVLACFSNNLLRREPLKLVDGGESQRTFIYIKDAIEAVLLMIENPDRANGHIFNVGNPNNEVTVRQLAEMMTKVYAKVSGETVLESPTVDVSSKEFYGEGYDDSDKRIPDMTIINKQLGWNPKTSLWDLLESTLTYQHRTYAEAIKKSIAKPSAS

SEQ ID NO: 616 - DNA, 1642 bp, Panicum virgatum
  misc_feature: Ceres Clone ID no. 1995643
  misc_feature: Encodes the peptide sequence at SEQ ID NO. 617
ggtagagagagaatcgggagagaagggagggcgagcgaggccgccgccaccgacatcgcctggtaacccgtcgtccacccacccacccacattccccgaacaccacgccgctgccaccgcgcgcattctccccgatccaaccgcaccaagagggggcaaggaagaagaaaggagggagacggggataccatgtcgtcgccctcgccggcgcccgcccgcatggatctggacggcaaccccgtcgcgcccctcaccatctgcatgatcggcgcgggtggcttcatcggctcccacctctgcgagaagctcatggccgagaccgcacacgtcgtcctcgccgtcgacgtctactgcgacaagatccgccacctcgtcgaccccgcgccgccgcacctcgccggacggatctccttccaccgcctcaacatcaagaacgactccaggctcgagggactcatcaagatggccgatctgactataaacctggcggccatctgcacgcccgccgactacaacacgcggcccctcgacaccatctacagcaacttcatcgacgccctcccagtggtcaagtactgctccgagaacaacaagcgtctcatccacttctccacctgcgaggtctacggcaagaccgtcggcagcttcctccccaaagaccaccctctccgcaaggaacctgaattttatgttctaaaagaagatgagtcgccctgcatttttggtccaatcgtgaaacagcgatggtcctatgcatgtgcaaagcaacttattgagaggcttatttttgctgaaggtgcagaaaatggacttgagttcacaattgtgagacctttcaattggattggaccaaggatggacttcattcctggtgttgatggccctagtgagggtgtacctcgggttttggcctgcttcagtaacaatctgctccgccgagagcccttgaagcttgttgatgggggccagtcccaaagaacttttgtctacattaaggatgccatcgaagctgttgttttgatgattgaaaatcctgctcgagctaatggtcacatcttcaacgttgggaatcctaacaatgaagttactgttagggagttggcccaaatgatgacagaggtctatgcaaacgtctcaggagaggcaccactagatgaacccatgattgacgtgagttcgagtcagttctacggtgaaggatatgatgatagtgacaagagaatccctgacatgactataatcaacaagcagctaggttggaatccaaagacacctctcaaggatttgctggagacaacattgacatatcagcacaagacatacaaggaagctgtgaaaaggcaaatggcacaggcttcagcgtcgagttgatgtattctatccattgtactttgattgctcctctgtgctgtgtcaagtcattctttggaatcatttcattggcgagagttgttattgttcgtatgttgcaacctgagtgagtgagattattaattagttgggcgcacatttctctgctgggtagcaatactatatcatattatagctgatctgctgatgtggtgggttattaagttctggtggtttggttcctttgaccacttgaaattgatgttggcagactcagattttttccactgac

SEQ ID NO: 617 - protein, 393 aa, Panicum virgatum
  misc_feature (23)..(293): Pfam name: Epimerase Pfam desc: NAD dependent epimerase/dehydratase family
  misc_feature: Ceres Clone ID no. 1995643
  misc_feature: Bit score of 1102.7 for HMM based on sequences of Figure 7
  misc_feature: Functional Homolog Of Ceres Annot ID no. 863641 at SEQ ID NO. 591
MSSPSPAPARMDLDGNPVAPLTICMIGAGGFIGSHLCEKLMAETAHVVLAVDVYCDKIRHLVDPAPPHLAGRISFHRLNIKNDSRLEGLIKMADLTINLAAICTPADYNTRPLDTIYSNFIDALPVVKYCSENNKRLIHFSTCEVYGKTVGSFLPKDHPLRKEPEFYVLKEDESPCIFGPIVKQRWSYACAKQLIERLIFAEGAENGLEFTIVRPFNWIGPRMDFIPGVDGPSEGVPRVLACFSNNLLRREPLKLVDGGQSQRTFVYIKDAIEAVVLMIENPARANGHIFNVGNPNNEVTVRELAQMMTEVYANVSGEAPLDEPMIDVSSSQFYGEGYDDSDKRIPDMTIINKQLGWNPKTPLKDLLETTLTYQHKTYKEAVKRQMAQASASS

SEQ ID NO: 618 - DNA, 1472 bp, Brassica napus
  misc_feature: Ceres Clone ID no. 1459647
  misc_feature: Encodes the peptide sequence at SEQ ID NO. 619
attgttaagagatcatcacgcggcttccctctctctctctctctttctttctccaccgactaaagcaatggcgaacggagccgttagattggatctggacggaaagccgatcaagccgctcacgatctgcatgatcggcgccggaggtttcatcggctctcacctctgcgagaagctcctgaccgagactccgcacaaggtcctcgcgctcgacgtctacaacgacaagatcaagcacttgctcgagcccgatacttccgagtgggccgagaggatccagtttcaccgcatcaacatcaagcacgattcgaggctcgagggactcgtgaagatggcggatctgacgattaatctcgctgcgatttgtactccggctgattacaatacgcgtccgcttgatactatctacagcaacttcatcgatgctctccctgtggttaagtactgctcagagaacaacaagcgtcttattcacttctccacctgtgaggtgtatgggaaaactataggaagctttcttcctaaggatcatcctctgcgtcaggatcctgatttttatgtactcaaagaagatacatccccttgcatttttggctccattgagaagcagaggtggtcatatgcttgtgcgaagcaactgattgagagactcgtctacgctggtgctgagaacggacttgagttcaccattgtaagaccgtttaactggattggacctaggatggacttcatccctggcattgatggtcctagcgagggtgtccctcgtgtcctggcctgctttagcaacaaccttctgcgacgtgaacctctgaagcttgtggatggtggagaatcacagagaaccttcatctacatcaaggatgctattgacgctgtcctcctgatgattgaaaacccagagagagccaatgggcgtatcttcaatgtaggtaacccaaacaatgaagtgacagtaagacaacttgctgaaatgatgactaaggtctactcaaaagtgagtggagagacagcaattgagagtccaacgatagacgtgagctccaaagaattttatggagagggttatgatgacagcgacaagagaatcccagacatgaccatcatcaaccgtcaacttggatggaacccgaagacgtctctttgggacttgcttgagtcgaccttaacttaccagcacaggacctacgctgaagccgttaagaaggccacctcaaaaccagtcgcatcttagaggtggtctatcatcacctcgaatcatttggtggctacttccttttctttcttttttttaatacacccagtattcccttaaaacaggccattctaagcgagtgatatatatcatggtcgttggttctagtttgcgcgttattgcttatatagtatatgctaatgtctttaatttcgttgttgaagcttaatatctttgtactttgtccaaaacttaaaaaaaaaagaatggtttgttc

SEQ ID NO: 619 - protein, 388 aa, Brassica napus
  misc_feature (20)..(289): Pfam name: Epimerase Pfam desc: NAD dependent epimerase/dehydratase family
  misc_feature: Ceres Clone ID no. 1459647
  misc_feature: Bit score of 1096.3 for HMM based on sequences of Figure 7
  misc_feature: Functional Homolog Of Ceres Annot ID no. 863641 at SEQ ID NO. 591
MANGAVRLDLDGKPIKPLTICMIGAGGFIGSHLCEKLLTETPHKVLALDVYNDKIKHLLEPDTSEWAERIQFHRINIKHDSRLEGLVKMADLTINLAAICTPADYNTRPLDTIYSNFIDALPVVKYCSENNKRLIHFSTCEVYGKTIGSFLPKDHPLRQDPDFYVLKEDTSPCIFGSIEKQRWSYACAKQLIERLVYAGAENGLEFTIVRPFNWIGPRMDFIPGIDGPSEGVPRVLACFSNNLLRREPLKLVDGGESQRTFIYIKDAIDAVLLMIENPERANGRIFNVGNPNNEVTVRQLAEMMTKVYSKVSGETAIESPTIDVSSKEFYGEGYDDSDKRIPDMTIINRQLGWNPKTSLWDLLESTLTYQHRTYAEAVKKATSKPVAS

SEQ ID NO: 620 - DNA, 1559 bp, Zea mays
  misc_feature: Ceres Clone ID no. 243057
  misc_feature: Encodes the peptide sequence at SEQ ID NO. 621
accgacatcgcctcttaacccgacaagccccattgcccaggagaaccccgtgccggggagcgagccgcgcgcattccccgtcccgtgccaccggaccaggggaaggaggacacacatgtcgtcgtctctctctccagcggcggcagccgcgcccctggatctggacggcaactccgtcgcgcccctcaccatctgcatgattggcgccggcggcttcatcggctcccacctctgcgagaagctcatggccgagacgcgccatgtcgtcctcgccgtcgacgtatactgcgataagatccgccacctcgtcgaccccgcgccgccgcacctcgcggggcgcatctccttccaccgcctcaacatcaagaatgactccaggctcgagggcctcatcaagatggccgatctgaccatcaacctggcggctatctgcacgccggcggactacaacacgcgccccctcgacaccatctacagcaacttcatcgatgcactcccagtggtcaagtactgctccgagaacagcaagcgtctcatccacttctccacgtgcgaggtctatggcaagaccatcggcagcttcctccccaaagaccacccgctccgcaaggaacctgaattttatgttctgaaagaagatgagtcaccctgtatttttggtccaatcgtgaaacaacgatggtcctatgcttgcgcgaagcaacttattgagaggcttatatttgctgagggtgcagaaaatggccttgaattcacaatcgtgagaccttttaattggattgggccaaggatggatttcattcctggtgtcgatggtcctagcgagggtgtaccccgggtgctggcttgcttcagtaacaatctgctccgccgagagcctttgaagcttgtcgatgggggccagtctcagagaacctttgtatacatcaaggatgccatcgaagctgttgtgttgatgattgaaaatcctgctcgagccaatggtcacatcttcaatgttgggaatcctgacaatgaggttacggttagggagttggcccaaatgatgacagaggtctatgcaaacgtctcaggagaggcgccgctggatgagcctatgatcgacgtgagttcgagtcagttctacggtgaaggatacgatgacagtgataagagaattcctgacatgactataatcaacaagcagctaggttggaacccaaagacgcctctcaaggatctgctggagacaacattgacgtaccagcacaagacatacaaagaagctgtgaagaggcaaatgtcgcaggcttcagcaacaagttaagttggcgttggctggggacggctcctcgtttagagccctagtcgcagcaactgtttcgcaagtcagaatacatatacgccggtaatcgatctgtttgaggccctagacgcgcccatgttttgtctgctaccaagggatgttatcctattgtgatataactactacctgtgtctggttgctcctaggtttttttcttgcaattatatgtatttatattgaaaaactagatattatttaaaatacaattaaaaac

SEQ ID NO: 621 - protein, 396 aa, Zea mays
  misc_feature (26)..(296): Pfam name: Epimerase Pfam desc: NAD dependent epimerase/dehydratase family
  misc_feature: Ceres Clone ID no. 243057
  misc_feature: Bit score of 1095.1 for HMM based on sequences of Figure 7
  misc_feature: Functional Homolog Of Ceres Annot ID no. 863641 at SEQ ID NO. 591
MSSSLSPAAAAAPLDLDGNSVAPLTICMIGAGGFIGSHLCEKLMAETRHVVLAVDVYCDKIRHLVDPAPPHLAGRISFHRLNIKNDSRLEGLIKMADLTINLAAICTPADYNTRPLDTIYSNFIDALPVVKYCSENSKRLIHFSTCEVYGKTIGSFLPKDHPLRKEPEFYVLKEDESPCIFGPIVKQRWSYACAKQLIERLIFAEGAENGLEFTIVRPFNWIGPRMDFIPGVDGPSEGVPRVLACFSNNLLRREPLKLVDGGQSQRTFVYIKDAIEAVVLMIENPARANGHIFNVGNPDNEVTVRELAQMMTEVYANVSGEAPLDEPMIDVSSSQFYGEGYDDSDKRIPDMTIINKQLGWNPKTPLKDLLETTLTYQHKTYKEAVKRQMSQASATS

SEQ ID NO: 622 - DNA, 1581 bp, Gossypium hirsutum
  misc_feature: Ceres Clone ID no. 1936952
  misc_feature: Encodes the peptide sequence at SEQ ID NO. 623
gcttctattttccacatatatacagacaaagacattctctcccatttctcaccatctccaattagcttctctctcttcctttgtcacgttcggcattcaaaaataacgaaacaccggcgttgtttcaaatggcgactagaatggatctggatggaaggcctataaagccgatgacgatatgcatgattggagccggcggcttcattggttctcacctttgtgagaaactgatggcggagacgccgcacaaggtgcttgccttggatgtttacagtgacactgacaagatcaagcaccttcttgagcctgactctcttccttgggctggccgtattgtgttccaccgacttaacatcaagcacgattctaggctcgaaggccttatcaagatggcagatctcacgataaatcttgcggcgatctgtactccagcagactataatactcgtccacttgacacgatttacagcaattttattgatgcacttccggtggtaaagtactgctcagagaacaacaagcgtcttattcacttctctacttgcgaagtgtatggcaaaacaattggaagctttcttcctaaagattctcctctccggaaggatcctgcctactatgtccttaaggaagatacctccccctgcatttttggttcaatcgaaaagcaaaggtggtcatatgcatgtgctaagcaattgattgagaggcttatttatgctgagggggcagagaatggccttgatttcaccattgtgagaccttttaactggattggacctaggatggatttcatccctggtattgatggtccaagtgagagtgttccaagagttctggcatgctttagtaataatctcttacgccgtgagccactaaagcttgtggatggtggtgaatctcagagaacttttgtttacattaaggatgctattgaagctgttctcttgatgattgaaaatcccgacagggccaatggtcatattttcaatgtcggcaacccaaataatgaagtcacagtgaggcaacttgctgaaatgatgactaaggtctatgcaaaggtaagtggagaaccttcactggagtcaccaacaattgatgtcagttccaaggaattttacggggagggatatgatgatagtgacaagagaattccagacatgaccataataaatagacaacttggttggaaccccaagacaacgctttgggacttgcttgaatcgacccttacctaccaacacaggacttatgctgaggctatcaagaaatccatggtaaaacctattgcatcctaaataggtaaagatgttcagaccatgcctaaggaaggatgcatgtaaaatttacttgttcgaaaaatgttccaattcttttttttccttttaaggagtcctatatatatctgaattgttgattttacttgtatgctacattttgggtcatcccttgtgtcaatagttaatagctcacattagctcaggcagttatgttccctttgtggtcctatgtgtacattattaaatttcttactgatctgaaccgatattgtgttcgtattatatatgttttgagttttgagct

SEQ ID NO: 623 - protein, 388 aa, Gossypium hirsutum
  misc_feature (17)..(289): Pfam name: Epimerase Pfam desc: NAD dependent epimerase/dehydratase family
  misc_feature: Ceres Clone ID no. 1936952
  misc_feature: Bit score of 1092.4 for HMM based on sequences of Figure 7
  misc_feature: Functional Homolog Of Ceres Annot ID no. 863641 at SEQ ID NO. 591
MATRMDLDGRPIKPMTICMIGAGGFIGSHLCEKLMAETPHKVLALDVYSDTDKIKHLLEPDSLPWAGRIVFHRLNIKHDSRLEGLIKMADLTINLAAICTPADYNTRPLDTIYSNFIDALPVVKYCSENNKRLIHFSTCEVYGKTIGSFLPKDSPLRKDPAYYVLKEDTSPCIFGSIEKQRWSYACAKQLIERLIYAEGAENGLDFTIVRPFNWIGPRMDFIPGIDGPSESVPRVLACFSNNLLRREPLKLVDGGESQRTFVYIKDAIEAVLLMIENPDRANGHIFNVGNPNNEVTVRQLAEMMTKVYAKVSGEPSLESPTIDVSSKEFYGEGYDDSDKRIPDMTIINRQLGWNPKTTLWDLLESTLTYQHRTYAEAIKKSMVKPIAS

SEQ ID NO: 624 - protein, 407 aa, Oryza sativa subsp. indica
  misc_feature (28)..(307): Pfam name: Epimerase Pfam desc: NAD dependent epimerase/dehydratase family
  misc_feature: Public GI ID no. 125529268
  misc_feature: Bit score of 1091.5 for HMM based on sequences of Figure 7
  misc_feature: Functional Homolog Of Ceres Annot ID no. 863641 at SEQ ID NO. 591
MSSSSSPPAASAAARLDLDGNPIAPLTICMIGAGGFIGSHLCEKLMAETAHVVYAVDVYCDKIRHLVDPAPPHLHGRISFHRLNIKNDSRLEGLIKMADLTINLAAICTPADYNTRPLDTIYSNFIDALPVVKYCSENNKRLIHFSTCEVYGKTIGSFLPTDHPLRKIGGGMDLVQEPEFYVLKEDESPCIFGPIVKQRWSYACAKQLIERLIFAEGAENGLEFTIVRPFNWIGPRMDFIPGVDGPSEGVPRVLACFSNNLLRREPLKLVDGGQSQRTFVYIKDAIEAVHLMIENPARANGQIFNVGNPNNEVTVRQLAEMMTEVYANVSGEPPLDEPMIDVSSKQFYGEGYDDSDKRIPDMTIINKQLGWNPKTPLKDLLETTLTYQHKTYKEAIKRQMSQASASS

SEQ ID NO: 625 - DNA, 1230 bp, Sorghum bicolor
  misc_feature: Ceres Annot ID no. 7951750
  misc_feature: Encodes the peptide sequence at SEQ ID NO. 626
atgtcgtcgtcgtctccctctccggcggcggcggccgcgcgcctggatctggacggcaaccccatcgcgcccctcaccatctgcatgattggcgccggcggcttcatcgggtcccacctctgcgagaagctcatggccgagacgcgccacgtcgtcctcgccgtcgacgtctactgcgacaagatccgccacctcgtcgaccccgcgccgccgcacctcgccggccgcatctctttccaccgcctcaacatcaagaacgactccaggctcgagggcctcatcaagatggccgatctgaccatcaacctggcggccatctgcacgccggcggactacaacacgcgccccctcgacaccatctacagcaacttcatcgacgcactcccagtggtcaaatactgctccgagaacagcaagcgtctcatccacttctccacctgcgaggtctatggcaagaccatcggcagcttcctccccaaagaccacccgctccgcaaggaacctgaattttatgttctgaaagaagatgagtcaccctgtatttttggtccaattgtgaaacaacgatggtcctatgcatgcgcaaagcaacttattgagaggcttatatttgctgaaggcgcagaaaatggccttgaattcacgattgtgagacctttcaattggattggcccaagaatggacttcattcctggtgttgatggtcctagtgagggtgtaccccgggttttggcttgcttcagtaactcttctcagaagatgcatggtacaatcgttttgcagaatctgctccgccgagagcccttgaagcttgttgatgggggccagtctcagagaacttttgtttacattaaggatgccatcgaagctgttgtgctaatgattgaaaatcctgctcgagccaatggtcacatcttcaatgttgggaatcctgacaatgaggttactgttagggagttggcccaaatgatgacagaggtctatgcaaacgtctcaggagaggcaccactggatgagcccatgattgatgtaagttcgagtcagttctatggtgaaggatatgatgacagtgataagagaattcccgacatgactataatcaacaagcagctaggttggaacccaaagactcctctcaaggatctgctggagacaacgttgacatatcagcacaagacatacaaagaagctgtgaagaggcaaatgtcgcaggcttcatcaacgagttag

SEQ ID NO: 626 - protein, 409 aa, Sorghum bicolor
  misc_feature (27)..(309): Pfam name: Epimerase Pfam desc: NAD dependent epimerase/dehydratase family
  misc_feature: Ceres Annot ID no. 7951750
  misc_feature: Bit score of 1084.6 for HMM based on sequences of Figure 7
  misc_feature: Functional Homolog Of Ceres Annot ID no. 863641 at SEQ ID NO. 591
MSSSSPSPAAAAARLDLDGNPIAPLTICMIGAGGFIGSHLCEKLMAETRHVVLAVDVYCDKIRHLVDPAPPHLAGRISFHRLNIKNDSRLEGLIKMADLTINLAAICTPADYNTRPLDTIYSNFIDALPVVKYCSENSKRLIHFSTCEVYGKTIGSFLPKDHPLRKEPEFYVLKEDESPCIFGPIVKQRWSYACAKQLIERLIFAEGAENGLEFTIVRPFNWIGPRMDFIPGVDGPSEGVPRVLACFSNSSQKMHGTIVLQNLLRREPLKLVDGGQSQRTFVYIKDAIEAVVLMIENPARANGHIFNVGNPDNEVTVRELAQMMTEVYANVSGEAPLDEPMIDVSSSQFYGEGYDDSDKRIPDMTIINKQLGWNPKTPLKDLLETTLTYQHKTYKEAVKRQMSQASSTS

SEQ ID NO: 627 - protein, 386 aa, Solanum tuberosum
  misc_feature (17)..(287): Pfam name: Epimerase Pfam desc: NAD dependent epimerase/dehydratase family
  misc_feature: Public GI ID no. 85718018
  misc_feature: Bit score of 1083.3 for HMM based on sequences of Figure 7
  misc_feature: Functional Homolog Of Ceres Annot ID no. 863641 at SEQ ID NO. 591
MAGRVDLDGNPIKPMTICMIGAGGFIGSHLCEKLMSETPHTVLAVDVYSDKIKHLLEPTSLPWNGRIQFHRINIKNDSRLEGLIKMADLTVNLAAICTPADYNTRPLDTIYSNFIDALPVVKYCSENGKRLIHFSTCEVYGKTIGAFLPEDSPLRQDPAYFVLSEEASPCIFGPIEKQRWSYACAKQLIERLIYAEGAENGLEFTIVRPFNWIGPRMDFIPGIDGPSEGVPRVLACFSNNLLRHEPLKLVDGGHSQRTFIYIKDAIEAVFLMIENPARANGHIFNVGNPNNEVTVKQLAEMMTQVYSKVSGETPLETPTVDVSSKEFYGEGYDDSDKRIPDMTIINRQLGWNPKTSLWDLLESTLTYQHRTYAEAVKQAMSKTTAN

SEQ ID NO: 628 - protein, 395 aa, Zea mays
  misc_feature (24)..(294): Pfam name: Epimerase Pfam desc: NAD dependent epimerase/dehydratase family
  misc_feature: Public GI ID no. 162462229
  misc_feature: Bit score of 1082.7 for HMM based on sequences of Figure 7
  misc_feature: Functional Homolog Of Ceres Annot ID no. 863641 at SEQ ID NO. 591
MSSSPSPAATRLDLDGNPIAPLTICMIGAGGFIGSHLCEKLMAETHHTVLAVDVYCDKIRHLVDPAPPHLAGRISFHRLNIKNDSRLEGLIKMADLTINLAAICTPADYNTRPLDTIYSNFIDALPVVKYCSENSKRLIHFPTCEVYGKTIGSFLPKDHPLRKEPEFYVLKEDESPCIFGPIVKQRWSYACAKQLIERLVFAEGAENGLDFTIVRPFNWIGPRMDFIPGVDGPSEGVPRVLACFSNNLLRREPLKLVDGGQSQRTFVYIKDAIEAVVLMIENPARANGHIFNVGNPNNEVTVRELAPMMTEVYTQMSQGEAPLDEPMIDVSSSQFYGEGYDDSDKRIPDMTIINKQLGWNPKTPLKDLLETTLTYQHKTYKEAAKRQMSQASAST

SEQ ID NO: 629 - DNA, 1170 bp, Populus balsamifera subsp. trichocarpa
  misc_feature: Ceres Annot ID no. 1460446
  misc_feature: Encodes the peptide sequence at SEQ ID NO. 630
atggcagcatcaacggtgaggattaatcttgatggaaaaccgataaatcagctaacaatattgatgatcggtgccggtggtttcatcgggtcccacctctgtgagaagatcttgcaggaaactccacacaagatcctagctcttgatgtttacagtgacaagatcaagcaccttctcgaaccggatagtctcgaatgggctggccggatccagtttcaccgtatcaatattaagcacgattctcgcctcgaaggcctaattaagatgtcagatctgacgataaatctggcggcgatctgtactccagcggattataatacgcgtcctttggatacgatttatagcaactttattgacgcgctgcccgtggtgaagtactgttcagagaatgggaagcgtttgattcacttctcgacttgtgaagtgtatggaaaaactattggtagttttcttcctaaagatagtcctcttcgtcaggaccctgcatactatgtcctcaaagaagatgcctctccctgcattttcggttctatcgagaagcagaggtggtcctatgcatgtgcaaagcagttgattgagaggttgatttatgctgagggtgcagagaatgggcttgagttcaccattgtgaggcccttcaactggattggacccagaatggatttcatacccggcattgatggcccaagtgagggtgttcccagggttctggcatgcttcagcaatgctcttcttcgtcgtgagcaactcaagcttgttgatggtggtgaatcccagagaacttttgtttacatcaaggatgccatagaggcggtcctcttgatgattgaaaatcctgacagggccaacggtcatatttttaatgttggcaaccctaacaatgaagtcactgttaggcagcttgctgaaatgatgacagcggtctacgcaaacgtaagtggcgaacctgcactggaggaacccacagttgatgtcagctccaaagagttctacggtgaaggatatgacgatagtgacaagagaattccagacatgaccataatcaataaacaacttggttggaaccccaagacatctgtgtgggacttgcttgattcaaccctcacttatcaacacaagacgtatgccgaggcagtcaagaaggttatctcaaaacccacaaccagctga

SEQ ID NO: 630 - protein, 389 aa, Populus balsamifera subsp. trichocarpa
  misc_feature (20)..(290): Pfam name: Epimerase Pfam desc: NAD dependent epimerase/dehydratase fam
  misc_feature: Ceres Annot ID no. 1460446
  misc_feature: Bit score of 1079.8 for HMM based on sequences of Figure 7
  misc_feature: Functional Homolog Of Ceres Annot ID no. 863641 at SEQ ID NO. 591
MAASTVRINLDGKPINQLTILMIGAGGFIGSHLCEKILQETPHKILALDVYSDKIKHLLEPDSLEWAGRIQFHRINIKHDSRLEGLIKMSDLTINLAAICTPADYNTRPLDTIYSNFIDALPVVKYCSENGKRLIHFSTCEVYGKTIGSFLPKDSPLRQDPAYYVLKEDASPCIFGSIEKQRWSYACAKQLIERLIYAEGAENGLEFTIVRPFNWIGPRMDFIPGIDGPSEGVPRVLACFSNALLRREQLKLVDGGESQRTFVYIKDAIEAVLLMIENPDRANGHIFNVGNPNNEVTVRQLAEMMTAVYANVSGEPALEEPTVDVSSKEFYGEGYDDSDKRIPDMTIINKQLGWNPKTSVWDLLDSTLTYQHKTYAEAVKKVISKPTTS

SEQ ID NO: 631 - protein, 387 aa, Nicotiana benthamiana
  misc_feature (18)..(288): Pfam name: Epimerase Pfam desc: NAD dependent epimerase/dehydratase family
  misc_feature: Public GI ID no. 37379419
  misc_feature: Bit score of 1071.0 for HMM based on sequences of Figure 7
  misc_feature: Functional Homolog Of Ceres Annot ID no. 863641 at SEQ ID NO. 591
  misc_feature (152)..(152): Xaa is any aa, unknown, or other
  misc_feature (365)..(365): Xaa is any aa, unknown, or other
MAGGRVDLDGNVIKPMKICMIGAGGFIGSHLCEKLMNETPHTVLAVDVYSDKIKHLLEPADLPWTGRIQFHRINIKNDSRLEGLIKMADLVVNLAAICTPADYNTRPLDTIYSNFIDALPVVKYCSENGKRLIHFSTCEVYGKTIGAFLPEXSPLRQDPAYYVLKEDVSPCIFGSIEKQRWSYACAKQLIERLIYAEGAENGLEFTIVRPFNWIGPRMDFIPGIDGPSEGVPRVLACFSNNLLRHEPLKLVDGGHSQRTFIYIKDAIEAVLLMIENPARANGQIFNVGNPNNEVTVRQLAEMMTQVYSKVSGESPPETPTIDVSSKEFYGEGYDDSDKRIPDMTLINRQLGWNPKTSLWDLLESXLTYQHRTYAEAVKQAMSKTTAN

SEQ ID NO: 632 - DNA, 1284 bp, Populus balsamifera subsp. trichocarpa
  misc_feature: Ceres Annot ID no. 1488364
  misc_feature: Encodes the peptide sequence at SEQ ID NO. 633
atggcatcatcagtggtgagggttgatcttgatggaaaaccaataaatccgctaacaatttgcatgatcggtgctggtggtttcattgggtcccacctgtgtgagaagatcttgaacgagactcaacacaagatcttagcccttgatgtttacaatgacaagatcaagcaccttctcgaaccggacagcctcccttgggctggccggatccagttccaccgtatcaatatcaaacacgactctcgcctcgaaggcctcatcaagatgtcagatctgacgataaatctggctgcgatctgtactccggcggattataatacgcgtcctttggatacgatttatagcaactttatcgacgcgttgcctgtggcgaagtactgttcagagaatgggaagcgtctgattcacttctcgacttgtgaagtgtatgggaaaactattgggagttttcttcctaaagacagtcctcttcgtcaggtagaggggtttggttctgtgtcaatgttttatattggtaatatgatcatatttagctcaatggaaggtgtcatcagtctttttttttattttgatttggctggagtgttgaaggatcctgcatattatgtgcttaaagaagatgcctctccctgcatttttggttccattgagaagcagagatggtcttatgcgtgtgcaaagcaattgattgagaggctggtttatgctgagggtgcagagaatggacttgagttcaccatcgtgaggcctttcaactggattggacccagaatggattttattcccggtgttgatggcccaagtgagggcgttccccgggttcttgcttgctttagcaatgctcttcttcgccgggagccgctcaagcttgtggatggtggcgaatcccagagaacatttgtttatattaaggatgccatcgaggctgttctcttgatgattgaaaatccttccagggccaatggtcatatttttaacgttggcaaccctaacaatgaagtcactgtgaggcagcttgctgaaatgatgacagcggtctacgcaaatgtaagtggagaacctgctctggaggaaccgacagttgatgtcagctccaaagagttctacggtgagggatatgacgatagtgacaagagaattccagacatgaccataatcaatagacaacttggttggaaccccaagacgtctctgtgggacttgctcgattcaaccctcacttatcaacacaagacttatgccgaggcaatcaagaaggtcatgtcacaacccacaaccagctga

SEQ ID NO: 633 - protein, 427 aa, Populus balsamifera subsp. trichocarpa
  misc_feature (20)..(328): Pfam name: Epimerase Pfam desc: NAD dependent epimerase/dehydratase family
  misc_feature: Ceres Annot ID no. 1488364
  misc_feature: Bit score of 1052.5 for HMM based on sequences of Figure 7
  misc_feature: Functional Homolog Of Ceres Annot ID no. 863641 at SEQ ID NO. 591
MASSVVRVDLDGKPINPLTICMIGAGGFIGSHLCEKILNETQHKILALDVYNDKIKHLLEPDSLPWAGRIQFHRINIKHDSRLEGLIKMSDLTINLAAICTPADYNTRPLDTIYSNFIDALPVAKYCSENGKRLIHFSTCEVYGKTIGSFLPKDSPLRQVEGFGSVSMFYIGNMIIFSSMEGVISLFFYFDLAGVLKDPAYYVLKEDASPCIFGSIEKQRWSYACAKQLIERLVYAEGAENGLEFTIVRPFNWIGPRMDFIPGVDGPSEGVPRVLACFSNALLRREPLKLVDGGESQRTFVYIKDAIEAVLLMIENPSRANGHIFNVGNPNNEVTVRQLAEMMTAVYANVSGEPALEEPTVDVSSKEFYGEGYDDSDKRIPDMTIINRQLGWNPKTSLWDLLDSTLTYQHKTYAEAIKKVMSQPTTS

SEQ ID NO: 634 - protein, 407 aa, Ipomoea trifida
  misc_feature (17)..(287): Pfam name: Epimerase Pfam desc: NAD dependent epimerase/dehydratase family
  misc_feature: Public GI ID no. 45935133
  misc_feature: Bit score of 994.2 for HMM based on sequences of Figure 7
  misc_feature: Functional Homolog Of Ceres Annot ID no. 863641 at SEQ ID NO. 591
MAGRVDLDGNPIKPITICMIGAGGFIGSHLCEKLMSETQHKVLAVDVYNDKIKHLLEPASLPWADRIQFHRLNIKNDSRLEGLIKMADLTVNLAAICTPADYNTRPLDTIYSNFIDALPVVKYCSENGKRLIHFSTCEVYGKTIGCFLPKDSPLRQDPAYYVLKEDASPCIFGPIEKQRWSYACAKQLIERLVYAEGAENGLEFTIVRPFNWIGPRMDFIPGIDGPSEGVPRVLACFSNNLLRREPLKLVDGGQSQRTFVYIKDAIEAVVLMIENPARANGHIFNVGNPNNEVTVRQLAEMMTQVYSKVSGEVSLETPTIDVSSKEFYGEGYDDSDKRIPDMTIINRQLAGLCDDQAGIQRLPYGTYLNPHSHTNTEHMPKLSSRQYQNQLQAEGKYQSQTALSDSF

SEQ ID NO: 635 - DNA, 1574 bp, Arabidopsis thaliana
  misc_feature: Ceres Clone ID no. 6892
  misc_feature: Encodes the peptide sequence at SEQ ID NO. 636
ttttctttcttttctcccattctcacaaatctctcttccacccattgttatctctgtagaagcgtgagagagatcacgcgtattcaccgacacaatcaaaatatggcgaacggagccgatagattggatctggacggtaaaccgattaagccgatgacgatatgcatgatcggtgccggaggtttcattggctctcatctctgtgagaagcttatgacggagactcctcacaaggttcttgcgcttgatgtttacaatgataagatcaagcacttgcttgagcctgataccgttcaatgggctggtcggatccagtttcatcgtatcaacattaagcatgattctagactcgaaggactgatcaagatggcagatctgacgataaatctagctgcgatctgtactcccgcagattacaatacgcgtcctcttgacactatctacagcaatttcattgatgctctcccagtggttaagtactgctcagagaacaacaagcgtctgattcacttttccacttgtgaagtgtatggaaaaactataggaagctttcttccaaaggatcatcctctgcgtcaagatcctgaattttatgtactcaaagaagatatatccccttgcatctttggttcaattgagaagcagaggtggtcatatgcttgtgcaaagcaacttatagagagacttgtttacgctgagggtgctgagaatggactcgagttcaccattgttagaccattcaactggattggacctaggatggatttcatccctggcattgatggtcccagcgagggtgtcccacgggttctagcgtgctttagtaacaaccttctgcgacgggagcctctcaagcttgtggatggtggagaatcacagagaaccttcatctacatcaaagatgctatcgaagctgtccttttgatgatcgaaaatccagagagagccaatgggcatatcttcaatgtaggcaacccaaacaatgaagtgacagtgagacaacttgctgaaatgatgactgaggtctacgccaaagtgagtggagagacagctatcgatagtccaaacgatcgacgtgagctccaaagagttttatggagaaggttatgatgacagcgacaagagaatcccagacatgaccatcatcaaccgtcaacttggatggaacccgaagacgtcgctttgggacttgcttgaatctaccttaacataccagcacacgacttatgcggaagccattaagaaggccacttcaaaaccagtcgcatcttagaggtcgtctctctttacaaacacctcaaatcatgtggtggctacgattccattctttctttttaaaaaaaaaattctcccaacagaaaccttctcttcccttattttaggccattctaaacaaatatatcatggtggttgattctagtttacgttttccttgttatatagtattactattaatgtttttgaaattcctttgttttgaagctttatatcttgtatttgtccgaaactaaaaagggaatggtttgtgcaaactataacattggggctttctttatatgttacatatctttggc

SEQ ID NO: 636 - protein, 335 aa, Arabidopsis thaliana
  misc_feature (20)..(290): Pfam name: Epimerase Pfam desc: NAD dependent epimerase/dehydratase family
  misc_feature: Ceres Clone ID no. 6892
  misc_feature: Bit score of 849.5 for HMM based on sequences of Figure 7
  misc_feature: Functional Homolog Of Ceres Annot ID no. 863641 at SEQ ID NO. 591
MANGADRLDLDGKPIKPMTICMIGAGGFIGSHLCEKLMTETPHKVLALDVYNDKIKHLLEPDTVQWAGRIQFHRINIKHDSRLEGLIKMADLTINLAAICTPADYNTRPLDTIYSNFIDALPVVKYCSENNKRLIHFSTCEVYGKTIGSFLPKDHPLRQDPEFYVLKEDISPCIFGSIEKQRWSYACAKQLIERLVYAEGAENGLEFTIVRPFNWIGPRMDFIPGIDGPSEGVPRVLACFSNNLLRREPLKLVDGGESQRTFIYIKDAIEAVLLMIENPERANGHIFNVGNPNNEVTVRQLAEMMTEVYAKVSGETAIDSPNDRRELQRVLWRRL

SEQ ID NO: 637 - DNA, 1063 bp, Glycine max
  misc_feature: Ceres Clone ID no. 1047104
  misc_feature: Encodes the peptide sequence at SEQ ID NO. 638
aatcacatctccgtcttctatatattatcagtcgctgagtcccgttaaaaagcaccaccaccaccaccaccacaacactattcttcttcgcagcaatggcgcgagtggatctggacgggaaccccatgaaggcacttacgatctgcatgatcggcgctggcggcttcataggctcgcatctctgcgagaagctcatgtccgaaacccctcacaccgtcctcgccctcgacgtctacaacgacaagatcaaacacctcctcgaaccctccgattccccctgggccggccgcatcaccttccaccgcctcaacatcaaacacgactctcgcctcgaaggcctcatcaagatggcagatctcactattaatctggctgccatttgcactcccgcggattacaacacccgccctctcgacaccatttacagcaatttcatcgacgcgctccccgtggtgaaatactgttccgagaacaacaagcgccttatccatttctctacttgcgaagtgtacggaaagacgattggagcctttctccctaaagatagtcctcttcgtaaggatccggcatactatgttcttaaagaagacgagtctccttgcatttttggttctattgaaaaacagaggtggtcttatgcctgtgcgaaacagttgattgagaggctgatttatgctgagggtgctgaaaatggcttggagttcacaattgtgaggccttttaactggattggacctcgaatggatttcattcctggcattgatggtccaagtgagggtgttcctcgggttcttgcatgctttagcaataatcttctcagaggagagcccctcaagcttgtggacggtggccagtcccagagaacctttgtttacattaaagatgctattgaagctgtcttgctgatgattgaaaaccctgccagggccaatggccacatatttaatgtgggtaacccaaacaatgaggttactgttaggcagcttgctgaaataatgattaaggtttattcaaaggtaagtggcgaacaaactcctgaaacacctaccgttgatgtgagctc

SEQ ID NO: 638 - protein, 322 aa, Glycine max
  misc_feature (16)..(286): Pfam name: Epimerase Pfam desc: NAD dependent epimerase/dehydratase family
  misc_feature: Ceres Clone ID no. 1047104
  misc_feature: Bit score of 813.7 for HMM based on sequences of Figure 7
  misc_feature: Functional Homolog Of Ceres Annot ID no. 863641 at SEQ ID NO. 591
MARVDLDGNPMKALTICMIGAGGFIGSHLCEKLMSETPHTVLALDVYNDKIKHLLEPSDSPWAGRITFHRLNIKHDSRLEGLIKMADLTINLAAICTPADYNTRPLDTIYSNFIDALPVVKYCSENNKRLIHFSTCEVYGKTIGAFLPKDSPLRKDPAYYVLKEDESPCIFGSIEKQRWSYACAKQLIERLIYAEGAENGLEFTIVRPFNWIGPRMDFIPGIDGPSEGVPRVLACFSNNLLRGEPLKLVDGGQSQRTFVYIKDAIEAVLLMIENPARANGHIFNVGNPNNEVTVRQLAEIMIKVYSKVSGEQTPETPTVDVS

1. A method of producing a plant, said method comprising growing a plant cell comprising an exogenous nucleic acid, said exogenous nucleic acid comprising a regulatory region operably linked to a nucleotide sequence encoding a polypeptide, wherein the HMM bit score of the amino acid sequence of said polypeptide is greater than about 210, said HMM based on the amino acid sequences depicted in one of FIGS. 1-7, and wherein said plant has a difference in the level of biomass as compared to the corresponding level of a control plant that does not comprise said nucleic acid.

2. A method of producing a plant, said method comprising growing a plant cell comprising an exogenous nucleic acid, said exogenous nucleic acid comprising a regulatory region operably linked to a nucleotide sequence encoding a polypeptide having 80 percent or greater sequence identity to an amino acid sequence selected from the group consisting of SEQ ID NO: 2, 4, 6, 8, 9, 11, 13, 14, 15, 16, 17, 19, 21, 22, 23, 25, 26, 28, 30, 32, 34, 36, 38, 39, 40, 41, 42, 43, 44, 45, 46, 48, 49, 50, 51, 52, 53, 54, 55, 56, 58, 60, 61, 62, 63, 64, 66, 68, 69, 70, 71, 72, 73, 74, 75, 76, 77, 78, 79, 80, 81, 82, 83, 84, 85, 86, 87, 88, 89, 90, 91, 92, 93, 94, 95, 96, 97, 98, 99, 100, 101, 102, 103, 104, 106, 107, 109, 111, 112, 114, 115, 117, 119, 120, 122, 124, 126, 127, 129, 131, 133, 135, 137, 139, 140, 141, 142, 143, 144, 145, 146, 147, 148, 149, 150, 151, 152, 153, 154, 155, 156, 157, 158, 159, 160, 161, 162, 163, 165, 166, 167, 169, 171, 173, 175, 176, 177, 179, 181, 183, 184, 185, 186, 188, 190, 192, 193, 195, 197, 198, 200, 202, 204, 206, 208, 210, 212, 214, 215, 217, 218, 219, 220, 222, 224, 226, 228, 230, 232, 234, 236, 238, 240, 241, 242, 243, 245, 247, 249, 251, 253, 254, 255, 256, 257, 258, 259, 260, 261, 262, 263, 264, 265, 266, 267, 268, 269, 270, 271, 272, 273, 274, 275, 276, 277, 278, 279, 280, 281, 282, 283, 284, 285, 286, 287, 288, 289, 290, 291, 292, 293, 294, 295, 296, 297, 298, 299, 300, 301, 302, 303, 304, 305, 306, 307, 308, 309, 310, 311, 312, 313, 315, 317, 319, 321, 323, 325, 327, 329, 330, 331, 332, 334, 335, 336, 338, 340, 341, 343, 345, 346, 347, 349, 349, 350, 351, 352, 353, 354, 355, 356, 357, 359, 360, 361, 362, 363, 364, 366, 367, 369, 371, 373, 374, 374, 375, 376, 376, 377, 378, 380, 382, 384, 385, 386, 387, 388, 389, 390, 391, 391, 393, 395, 397, 398, 399, 400, 400, 401, 401, 403, 403, 405, 405, 407, 407, 408, 410, 411, 413, 414, 415, 416, 417, 418, 419, 420, 420, 421, 422, 423, 424, 426, 426, 428, 428, 429, 430, 430, 431, 432, 432, 433, 433, 434, 435, 436, 437, 438, 439, 440, 441, 442, 443, 444, 445, 446, 447, 448, 449, 450, 451, 452, 453, 453, 454, 455, 456, 457, 458, 459, 460, 461, 462, 463, 464, 465, 466, 467, 468, 469, 470, 471, 472, 474, 475, 477, 479, 481, 483, 485, 487, 488, 489, 490, 492, 494, 496, 498, 500, 502, 503, 504, 506, 508, 510, 511, 513, 515, 517, 518, 519, 521, 523, 525, 527, 529, 531, 533, 534, 536, 538, 540, 541, 543, 544, 546, 547, 548, 549, 550, 551, 552, 553, 554, 555, 557, 559, 560, 562, 564, 566, 568, 569, 570, 571, 572, 573, 574, 575, 576, 577, 578, 580, 582, 584, 586, 587, 588, 589, 591, 593, 595, 596, 598, 600, 602, 603, 605, 606, 608, 608, 609, 610, 611, 612, 613, 615, 617, 619, 621, 623, 624, 626, 627, 628, 630, 631, 633, 634, 636, and 638, wherein a plant produced from said plant cell has a difference in the level of biomass as compared to the corresponding level of a control plant that does not comprise said nucleic acid.

3. The method of claim 1, wherein the polypeptide comprises a polyprenyl synthetase domain having 60 percent or greater sequence identity to the polyprenyl synthetase domain of residues 93 to 356 of SEQ ID NO: 2.

4. The method of claim 1, wherein the polypeptide comprises a multiprotein bridging factor 1 domain having 60 percent or greater sequence identity to the multiprotein bridging factor 1 domain of residues 11 to 83 of SEQ ID NO: 165, and wherein the polypeptide comprises an helix-turn-helix domain having 60 percent or greater sequence identity to the helix-turn-helix domain of residues 91 to 145 of SEQ ID NO: 165.

5. The method of claim 1, wherein the polypeptide comprises a plant neutral invertase domain having 60 percent or greater sequence identity to the plant neutral invertase domain of residues 84 to 551 of SEQ ID NO: 315.

6. The method of claim 1, wherein the polypeptide comprises a sedlin, N-terminal conserved region having 60 percent or greater sequence identity to the sedlin, N-terminal conserved region of residues 9 to 126 of SEQ ID NO: 474.

7. The method of claim 1, wherein the polypeptide comprises a G-box binding protein MFMR domain having 60 percent or greater sequence identity to the G-box binding protein MFMR domain of residues 1 to 188 of SEQ ID NO: 521, and wherein the polypeptide comprises a bZIP 1 transcription factor domain having 60 percent or greater sequence identity to the bZIP 1 transcription factor domain of 279 to 342 of SEQ ID NO: 521, and wherein the polypeptide comprises a bZIP 2 basic region leucine zipper domain having 60 percent or greater sequence identity to bZIP 2 basic region leucine zipper domain of residues 279 to 333 of SEQ ID NO: 521.

8. The method of claim 1, wherein the polypeptide comprises an epimerase domain having 60 percent or greater sequence identity to the epimerase domain of residues 20 to 290 of SEQ ID NO: 591.

9. A method of producing a plant, said method comprising growing a plant cell comprising an exogenous nucleic acid, said exogenous nucleic acid comprising a regulatory region operably linked to a nucleotide sequence having 80 percent or greater sequence identity to a nucleotide sequence selected from the group consisting of SEQ ID NO: 1, 3, 5, 7, 10, 12, 18, 20, 24, 27, 29, 31, 33, 35, 37, 47, 57, 59, 65, 67, 105, 108, 110, 113, 116, 118, 121, 123, 125, 128, 130, 132, 134, 136, 138, 164, 168, 170, 172, 174, 178, 180, 182, 187, 189, 191, 194, 196, 199, 201, 203, 205, 207, 209, 211, 213, 216, 221, 223, 225, 227, 229, 231, 233, 235, 237, 239, 244, 246, 248, 250, 252, 314, 316, 318, 320, 322, 324, 326, 328, 333, 337, 339, 342, 344, 348, 358, 365, 368, 370, 372, 379, 381, 383, 392, 394, 396, 402, 404, 406, 409, 412, 425, 427, 473, 476, 478, 480, 482, 484, 486, 491, 493, 495, 497, 499, 501, 505, 507, 509, 512, 514, 516, 520, 522, 524, 526, 528, 530, 532, 535, 537, 539, 542, 556, 558, 561, 563, 565, 567, 579, 581, 583, 585, 590, 592, 594, 597, 599, 601, 604, 607, 614, 616, 618, 620, 622, 625, 629, 632, 635, and 637, or a fragment thereof, wherein a plant produced from said plant cell has a difference in the level of biomass as compared to the corresponding level of a control plant that does not comprise said nucleic acid.

10. A method of producing a plant, said method comprising growing a plant cell comprising an exogenous nucleic acid, said exogenous nucleic acid effective for downregulating an endogenous nucleic acid in the plant cell, wherein the endogenous nucleic acid encodes a polypeptide, and wherein the HMM bit score of the amino acid sequence of the polypeptide is greater than about 210, said HMM based on the amino acid sequences depicted in one of FIGS. 1-7.

11. A method of modulating the level of biomass in a plant, said method comprising introducing into a plant cell an exogenous nucleic acid, said exogenous nucleic acid comprising a regulatory region operably linked to a nucleotide sequence encoding a polypeptide, wherein the HMM bit score of the amino acid sequence of said polypeptide is greater than about 210, said HMM based on the amino acid sequences depicted in one of FIGS. 1-7, and wherein a plant produced from said plant cell has a difference in the level of biomass as compared to the corresponding level of a control plant that does not comprise said exogenous nucleic acid.

12. A method of modulating the level of biomass in a plant, said method comprising introducing into a plant cell an exogenous nucleic acid, said exogenous nucleic acid comprising a regulatory region operably linked to a nucleotide sequence encoding a polypeptide having 80 percent or greater sequence identity to an amino acid sequence selected from the group consisting of SEQ ID NO: 2, 4, 6, 8, 9, 11, 13, 14, 15, 16, 17, 19, 21, 22, 23, 25, 26, 28, 30, 32, 34, 36, 38, 39, 40, 41, 42, 43, 44, 45, 46, 48, 49, 50, 51, 52, 53, 54, 55, 56, 58, 60, 61, 62, 63, 64, 66, 68, 69, 70, 71, 72, 73, 74, 75, 76, 77, 78, 79, 80, 81, 82, 83, 84, 85, 86, 87, 88, 89, 90, 91, 92, 93, 94, 95, 96, 97, 98, 99, 100, 101, 102, 103, 104, 106, 107, 109, 111, 112, 114, 115, 117, 119, 120, 122, 124, 126, 127, 129, 131, 133, 135, 137, 139, 140, 141, 142, 143, 144, 145, 146, 147, 148, 149, 150, 151, 152, 153, 154, 155, 156, 157, 158, 159, 160, 161, 162, 163, 165, 166, 167, 169, 171, 173, 175, 176, 177, 179, 181, 183, 184, 185, 186, 188, 190, 192, 193, 195, 197, 198, 200, 202, 204, 206, 208, 210, 212, 214, 215, 217, 218, 219, 220, 222, 224, 226, 228, 230, 232, 234, 236, 238, 240, 241, 242, 243, 245, 247, 249, 251, 253, 254, 255, 256, 257, 258, 259, 260, 261, 262, 263, 264, 265, 266, 267, 268, 269, 270, 271, 272, 273, 274, 275, 276, 277, 278, 279, 280, 281, 282, 283, 284, 285, 286, 287, 288, 289, 290, 291, 292, 293, 294, 295, 296, 297, 298, 299, 300, 301, 302, 303, 304, 305, 306, 307, 308, 309, 310, 311, 312, 313, 315, 317, 319, 321, 323, 325, 327, 329, 330, 331, 332, 334, 335, 336, 338, 340, 341, 343, 345, 346, 347, 349, 349, 350, 351, 352, 353, 354, 355, 356, 357, 359, 360, 361, 362, 363, 364, 366, 367, 369, 371, 373, 374, 374, 375, 376, 376, 377, 378, 380, 382, 384, 385, 386, 387, 388, 389, 390, 391, 391, 393, 395, 397, 398, 399, 400, 400, 401, 401, 403, 403, 405, 405, 407, 407, 408, 410, 411, 413, 414, 415, 416, 417, 418, 419, 420, 420, 421, 422, 423, 424, 426, 426, 428, 428, 429, 430, 430, 431, 432, 432, 433, 433, 434, 435, 436, 437, 438, 439, 440, 441, 442, 443, 444, 445, 446, 447, 448, 449, 450, 451, 452, 453, 453, 454, 455, 456, 457, 458, 459, 460, 461, 462, 463, 464, 465, 466, 467, 468, 469, 470, 471, 472, 474, 475, 477, 479, 481, 483, 485, 487, 488, 489, 490, 492, 494, 496, 498, 500, 502, 503, 504, 506, 508, 510, 511, 513, 515, 517, 518, 519, 521, 523, 525, 527, 529, 531, 533, 534, 536, 538, 540, 541, 543, 544, 546, 547, 548, 549, 550, 551, 552, 553, 554, 555, 557, 559, 560, 562, 564, 566, 568, 569, 570, 571, 572, 573, 574, 575, 576, 577, 578, 580, 582, 584, 586, 587, 588, 589, 591, 593, 595, 596, 598, 600, 602, 603, 605, 606, 608, 608, 609, 610, 611, 612, 613, 615, 617, 619, 621, 623, 624, 626, 627, 628, 630, 631, 633, 634, 636, and 638, wherein a plant produced from said plant cell has a difference in the level of biomass as compared to the corresponding level of a control plant that does not comprise said nucleic acid.

13. The method of claim 1, wherein said polypeptide is selected from the group consisting of SEQ ID NO: 2, 106, 165, 315, 474, 521, and 591.

14. A method of modulating the level of biomass in a plant, said method comprising introducing into a plant cell an exogenous nucleic acid, said exogenous nucleic acid comprising a regulatory region operably linked to a nucleotide sequence having 80 percent or greater sequence identity to a nucleotide sequence selected from the group consisting of SEQ ID NO: 1, 3, 5, 7, 10, 12, 18, 20, 24, 27, 29, 31, 33, 35, 37, 47, 57, 59, 65, 67, 105, 108, 110, 113, 116, 118, 121, 123, 125, 128, 130, 132, 134, 136, 138, 164, 168, 170, 172, 174, 178, 180, 182, 187, 189, 191, 194, 196, 199, 201, 203, 205, 207, 209, 211, 213, 216, 221, 223, 225, 227, 229, 231, 233, 235, 237, 239, 244, 246, 248, 250, 252, 314, 316, 318, 320, 322, 324, 326, 328, 333, 337, 339, 342, 344, 348, 358, 365, 368, 370, 372, 379, 381, 383, 392, 394, 396, 402, 404, 406, 409, 412, 425, 427, 473, 476, 478, 480, 482, 484, 486, 491, 493, 495, 497, 499, 501, 505, 507, 509, 512, 514, 516, 520, 522, 524, 526, 528, 530, 532, 535, 537, 539, 542, 556, 558, 561, 563, 565, 567, 579, 581, 583, 585, 590, 592, 594, 597, 599, 601, 604, 607, 614, 616, 618, 620, 622, 625, 629, 632, 635, and 637, or a fragment thereof, wherein a plant produced from said plant cell has a difference in the level of biomass as compared to the corresponding level of a control plant that does not comprise said nucleic acid.

15. A plant cell comprising an exogenous nucleic acid, said exogenous nucleic acid comprising a regulatory region operably linked to a nucleotide sequence encoding a polypeptide, wherein the HMM bit score of the amino acid sequence of said polypeptide is greater than about 210, said HMM based on the amino acid sequences depicted in one of FIGS. 1-7, and wherein said plant has a difference in the level of biomass as compared to the corresponding level of a control plant that does not comprise said nucleic acid.

16. A plant cell comprising an exogenous nucleic acid said exogenous nucleic acid comprising a regulatory region operably linked to a nucleotide sequence encoding a polypeptide having 80 percent or greater sequence identity to an amino acid sequence selected from the group consisting of SEQ ID NO: 2, 4, 6, 8, 9, 11, 13, 14, 15, 16, 17, 19, 21, 22, 23, 25, 26, 28, 30, 32, 34, 36, 38, 39, 40, 41, 42, 43, 44, 45, 46, 48, 49, 50, 51, 52, 53, 54, 55, 56, 58, 60, 61, 62, 63, 64, 66, 68, 69, 70, 71, 72, 73, 74, 75, 76, 77, 78, 79, 80, 81, 82, 83, 84, 85, 86, 87, 88, 89, 90, 91, 92, 93, 94, 95, 96, 97, 98, 99, 100, 101, 102, 103, 104, 106, 107, 109, 111, 112, 114, 115, 117, 119, 120, 122, 124, 126, 127, 129, 131, 133, 135, 137, 139, 140, 141, 142, 143, 144, 145, 146, 147, 148, 149, 150, 151, 152, 153, 154, 155, 156, 157, 158, 159, 160, 161, 162, 163, 165, 166, 167, 169, 171, 173, 175, 176, 177, 179, 181, 183, 184, 185, 186, 188, 190, 192, 193, 195, 197, 198, 200, 202, 204, 206, 208, 210, 212, 214, 215, 217, 218, 219, 220, 222, 224, 226, 228, 230, 232, 234, 236, 238, 240, 241, 242, 243, 245, 247, 249, 251, 253, 254, 255, 256, 257, 258, 259, 260, 261, 262, 263, 264, 265, 266, 267, 268, 269, 270, 271, 272, 273, 274, 275, 276, 277, 278, 279, 280, 281, 282, 283, 284, 285, 286, 287, 288, 289, 290, 291, 292, 293, 294, 295, 296, 297, 298, 299, 300, 301, 302, 303, 304, 305, 306, 307, 308, 309, 310, 311, 312, 313, 315, 317, 319, 321, 323, 325, 327, 329, 330, 331, 332, 334, 335, 336, 338, 340, 341, 343, 345, 346, 347, 349, 349, 350, 351, 352, 353, 354, 355, 356, 357, 359, 360, 361, 362, 363, 364, 366, 367, 369, 371, 373, 374, 374, 375, 376, 376, 377, 378, 380, 382, 384, 385, 386, 387, 388, 389, 390, 391, 391, 393, 395, 397, 398, 399, 400, 400, 401, 401, 403, 403, 405, 405, 407, 407, 408, 410, 411, 413, 414, 415, 416, 417, 418, 419, 420, 420, 421, 422, 423, 424, 426, 426, 428, 428, 429, 430, 430, 431, 432, 432, 433, 433, 434, 435, 436, 437, 438, 439, 440, 441, 442, 443, 444, 445, 446, 447, 448, 449, 450, 451, 452, 453, 453, 454, 455, 456, 457, 458, 459, 460, 461, 462, 463, 464, 465, 466, 467, 468, 469, 470, 471, 472, 474, 475, 477, 479, 481, 483, 485, 487, 488, 489, 490, 492, 494, 496, 498, 500, 502, 503, 504, 506, 508, 510, 511, 513, 515, 517, 518, 519, 521, 523, 525, 527, 529, 531, 533, 534, 536, 538, 540, 541, 543, 544, 546, 547, 548, 549, 550, 551, 552, 553, 554, 555, 557, 559, 560, 562, 564, 566, 568, 569, 570, 571, 572, 573, 574, 575, 576, 577, 578, 580, 582, 584, 586, 587, 588, 589, 591, 593, 595, 596, 598, 600, 602, 603, 605, 606, 608, 608, 609, 610, 611, 612, 613, 615, 617, 619, 621, 623, 624, 626, 627, 628, 630, 631, 633, 634, 636, and 638, wherein a plant produced from said plant cell has a difference in the level of biomass as compared to the corresponding level of a control plant that does not comprise said nucleic acid.

17. A plant cell comprising an exogenous nucleic acid said exogenous nucleic acid comprising a regulatory region operably linked to a nucleotide sequence having 80 percent or greater sequence identity to a nucleotide sequence selected from the group consisting of SEQ ID NO: 1, 3, 5, 7, 10, 12, 18, 20, 24, 27, 29, 31, 33, 35, 37, 47, 57, 59, 65, 67, 105, 108, 110, 113, 116, 118, 121, 123, 125, 128, 130, 132, 134, 136, 138, 164, 168, 170, 172, 174, 178, 180, 182, 187, 189, 191, 194, 196, 199, 201, 203, 205, 207, 209, 211, 213, 216, 221, 223, 225, 227, 229, 231, 233, 235, 237, 239, 244, 246, 248, 250, 252, 314, 316, 318, 320, 322, 324, 326, 328, 333, 337, 339, 342, 344, 348, 358, 365, 368, 370, 372, 379, 381, 383, 392, 394, 396, 402, 404, 406, 409, 412, 425, 427, 473, 476, 478, 480, 482, 484, 486, 491, 493, 495, 497, 499, 501, 505, 507, 509, 512, 514, 516, 520, 522, 524, 526, 528, 530, 532, 535, 537, 539, 542, 556, 558, 561, 563, 565, 567, 579, 581, 583, 585, 590, 592, 594, 597, 599, 601, 604, 607, 614, 616, 618, 620, 622, 625, 629, 632, 635, and 637, or a fragment thereof, wherein a plant produced from said plant cell has a difference in the level of biomass as compared to the corresponding level of a control plant that does not comprise said nucleic acid.

18. A transgenic plant comprising the plant cell of claim 15.

19. The transgenic plant of claim 18, wherein said plant is a member of a species selected from the group consisting of Panicum virgatum (switchgrass), Sorghum bicolor (sorghum, sudangrass), Miscanthus giganteus (miscanthus), Saccharum sp. (energycane), Populus balsamifera (poplar), Zea mays (corn), Glycine max (soybean), Brassica napus (canola), Triticum aestivum (wheat), Gossypium hirsutum (cotton), Oryza sativa (rice), Helianthus annuus (sunflower), Medicago sativa (alfalfa), Beta vulgaris (sugarbeet), or Pennisetum glaucum (pearl millet).

20. A transgenic plant comprising the plant cell of claim 16, wherein said polypeptide is selected from the group consisting of SEQ ID NO: 2, 106, 165, 315, 474, 521, and 591.

21. A seed product comprising embryonic tissue from a transgenic plant according to claim 20.

22. An isolated nucleic acid comprising a nucleotide sequence having 85% or greater sequence identity to the nucleotide sequence set forth in SEQ ID NO: 10, 18, 27, 35, 37, 57, 67, 116, 128, 130, 132, 138, 164, 180, 207, 216, 231, 239, 328, 333, 339, 344, 348, 358, 365, 368, 370, 372, 379, 381, 383, 392, 394, 396, 404, 406, 425, 427, 473, 478, 482, 486, 491, 495, 497, 499, 505, 509, 512, 520, 526, 528, 535, 539, 556, 558, 561, 563, 565, 567, 583, 592, 597, 604, 614, 622, 625, 632, or 637.

23. An isolated nucleic acid comprising a nucleotide sequence encoding a polypeptide having 80% or greater sequence identity to the amino acid sequence set forth in SEQ ID NO: 11, 13, 19, 28, 34, 36, 38, 58, 109, 114, 117, 129, 133, 139, 165, 165, 181, 334, 340, 345, 349, 359, 366, 369, 371, 373, 380, 382, 384, 393, 395, 397, 405, 407, 426, 428, 474, 492, 500, 506, 510, 513, 517, 536, 540, 557, 559, 562, 564, 566, 568, 584, 593, 598, 600, 608, 615, 623, 633, 636, or 638.

24.-27. (canceled)
